United States Patent Application Publication US 2024/0180975 A1 - sequence listing, part 3

SEQ ID NO: 1 - DNA, 5342333 bp, Flavobacterium sp. (residues 3,561,557-5,342,333 of 5,342,333)
  misc_feature (1)..(10): Whole genome sequence of Flavobacterium sp. bacterial strain with Accession Number No. I-5481 deposited at the CNCM on January 24, 2020 (UGB 4466)
  misc_feature (13753)..(13851): n is a, c, g, or t
  misc_feature (749614)..(749623): n is a, c, g, or t
  misc_feature (862940)..(863039): n is a, c, g, or t
  misc_feature (899105)..(899114): n is a, c, g, or t
  misc_feature (1197031)..(1197128): n is a, c, g, or t
  misc_feature (1435433)..(1435531): n is a, c, g, or t
  misc_feature (1958084)..(1958183): n is a, c, g, or t
  misc_feature (2393366)..(2393465): n is a, c, g, or t
  misc_feature (2989436)..(2989533): n is a, c, g, or t
  misc_feature (3448526)..(3448623): n is a, c, g, or t
  misc_feature (3525681)..(3525779): n is a, c, g, or t
  misc_feature (3751461)..(3751555): n is a, c, g, or t
  misc_feature (4214851)..(4214949): n is a, c, g, or t
  misc_feature (4574523)..(4574622): n is a, c, g, or t
  misc_feature (4634982)..(4635078): n is a, c, g, or t
  misc_feature (5147970)..(5148068): n is a, c, g, or t
  misc_feature (5289451)..(5289460): n is a, c, g, or t
attttggtttaccgcaagattttgtgaaacctaaaaaaattcaactgctggtaaaagctgtaaatgcctatataaacgatagggaaatagatattgaagtccgttttgacatcatcgcgatacacaaaaaaaaggaaacatttgcaattgaacatattacagacgctttcttccatttttaacataattttatattgttatatttgtaacaaattgtttttttatttatattcgcgaggttttataacacaaaattaactacacccaaccaattaagttacaaaaaaaaaagaaaaaaactatgaaaaccgtttcttcaatcgtcgagaattacattaaaacaaaaccctttttattaaatgcgctatcgcttggaatcatcaacctcacttctctttcacggaacattatgaccgaattagaaagtgaatttggtaaagaagtaaaacaaggcgctgttgtaatgtcattgaaacgactcacagaagaattggattttaaactgaatcataaaatcaataaagtaattaagaatataggcgaaatcactgttcgatctgaattgacggattacacttttgccgcttccgaaactgttttgaacaaacaggctgatttaatttctgacattaatgctttatctgatatcttttatacctcatcacgcggagtaaacgaaaccaatattgtggtaagcagcagtgtaaatcatttggttgaaaaacactttatgcgcgagaaacttattcagaagttagacaacctggcctccataactgtaaaattaccaaaagaaaacatcgtggttccaggaatctattacttcattttccaacgtttagcatgggaaggaattattatcaatgaagtcatttcgacttcaaatgaattcaccattttagttggtgaagatcaggttgatgttgcttttaaagtaattaaggatctgaaaaactagatttaaattagcactaaaagaatctttagaaatgctttcatttcagcttacaatccttttatcttttaatagaagataaaaggatttttttatgattaggaaaacaacattattcccaaatctattgctctgaaagagccttagcaacagcatagtgcaaagcactatgaataataaaaagggtgagtaatgccctgaaagggcaaaagcctgatcgcaatgaaaagaaatcatactcttttgtgtgttttttttaaactgaactgttccttattaaaatccatacttgcttttgccctttcagggcgatatttacacttaatttatactatagtgcgttccactatgctattgcttttgggctttcagctcttttttaatcctctcgaatgcttatgtcaagggggaaacataataaataaatttactcaatgcatgaactgttgtcctaatctgtgaatatttacacgtcttctggcaatctcctttaaaactaatcaatataattttctaacttaaaatgcgttagggatgggagcgatatccttttgcggcagctgaaattttttcaatttcccaaaatctcttgtcgcaaaagatttagcggacagcccgacccgaagggtaacgccctaacttttataataattttacccgtccttatataggtactaaaaataaaacccgacagttttgaaatctgtcgggtttagaatattataccttttaaaattattattcacccaataattccatcaactccaatgctcgtttcgtagattttacattatcaaaagtcaataaaaggcgtaaaccgttaggagtttgtttttctttcatctgacaaagattactatgagtctgtacaaatttgatcactttatggaaacgcttcgattggtaataatccgattgttggtctgaaacaaaataaccgatcattttgcctttcttcatcactaatttctcaatacctacacttgttgcaatccatttgatgcgaatactattcatcaaggcattggcacgtggcggcatcggaccaaaacggtcaattaatttattttgaaagattaccagttctacctcattttttacaccgcccaactcgttgtataaactcaaacgttcggtgacattgttgatgtattcatcagaaaataacaactcaaaatcagtatcgatttgcagatcttttacatactccttggtttcaatatcgttctcttccggatataagtccttgaattcattctccttcaattcttcgatggcctcattcatgattttttggtaggtatcaaatccaatttcattaatgaaaccgctttgttctccacctaataaatctcctgctccacgaatttcaagatctttcatcgcaatgttaaaaccactacctagttcgctaaactgctctaaagcctgaatacgttttctggcatcctcagtcatagaggaataaggcggacagatgaaataacaaaatgcttttttattgcttcggcctactcttcctcgcatttggtgcagatcagacagtccaaaattattggcattgttgatgaaaatggtattggcatttggtacgtccaaaccactttcgataattgttgtggctaccagaacatcgaaatcgccgttcatgaaacccagcatcaattcttcgagtttcgcaccctccatttgaccgtggccgattccaactctggcatttggtaccaaacgctgaatcataccggcaacttcttttatgttttcgattcggttattgatgaagaaaacctgtccgttacgctgaatttcatacgaaatggcatcgcgaattatttcttcattaaacccaacaacattggtttctataggatatcggtttggcggaggggtcgtaataacagacaaatctctcgctgccattaacgaaaactgaagcgttctcgggattggcgttgccgttaaggttagggtatcgacattcgcagcaatggtcttaagtttatcttttacgtttactccaaacttttgttcctcgtcgacaatcaacaaaccaaggtctttaaaaactacatttttattgactaattggtgtgttccaatcacaatatccagtttcccttctgccaaatcttttaaagtttgtgctttctgtttagcagttctaaagcggttcatataaccaatggtaaccggcatgtctttcaaacgttctgaaaacgtacgataatgctggtacgccaaaatggtggtcggaaccaaaacggctacctgtttactattgtctactgccttaaaggccgcacgaatcgctacctctgtttttccaaaacctacatcaccacaaactaaacgatccatcggacgatcgctttccatatccgctttgacttcctgagtcgatttagtttgatccggtgtgtcttcgtatataaacgaactttctaattcgttctgcaaataactgtccggtgcaaactgaaaccctttttccagacgtcgtttcgcatacaactgaattaaattgaaggcaatatgtttgacccgcgctttggttttttgttttaaaactttccaggcgtttgatcccagtttatagattttgggaggggttccgtcttttccgttgtatttggagattttatgaagcgagtgaatactcacatacactatatcattatcggcataaaccagttttatcgcttcctgcgttttaccttcaacctgaattttttgcaggccgccaaattttccaattccgtgatcgatatgcgttacataatcaccaaccgaaagcgctgttaattccttaagggtaatattctgctttttggagtaaccgttttttatattaaatttgtgataacgctcaaaaatctggtgatcggtataggccgtaatctgactttcttcgtcaataaatccctggtacaaaggcaggacaacagtatgatattgttttctaatgttctcggaattagcttcgtctaaggtttcgaaaatatcatgaaaacgcttggcctgagtttcattcgaacagaacagataatttttatatccgttaaaatgattgtcgctcaggttattcagcagcaaatcaaattgtttgttgaaagagggctgcgggtgaatatgaaaatcgaatgtttttgtgattttaaaaacaggttttgaagccaattcgactatcgaaaaatctaaagcgcgtttgataaatgagctttgatttaagaatagtttttcaggttcagcccgttttatttcttttgaaagtttctcgaaagcttcttcggccctgacgaattgtttgtctaactgagtgaaaagtccttctgtattttgaataaataagacggttctctcagcaatatagtctaagaaactctctctgttttcctgaaaaagtttgttctcgacattcgggattatcgtgatttttttatgggtttccaccgataactgtgtttcgacatcaaaacttctgatgctgtctacttcgttaccaaaaaactcaattcggtacggatgatcgttagaaaacgagaacacatcgacaattccgcctcgaacagaaaactctcctggctcggtaataaaatcgactcttttaaactcatattcaaacaaaacttcgttgataaaatctatcgaaattttatcgttcaaagcgactttcaacgtgtttttatcaagttccctgcgtgtcactactttctcaaaaagcgcttcgggataagtaacaatcactgcaggttttttacgggaattgattcggtttaaaacctcagcacgaagcaaaacattggcattgtctgtttcatcaatttgatacggacggcgaaatgacgcgggataaaacagtacatcctgttctccgatcatttgttcgagatcgttcaaataataagccgcttcttctttgttgtctaaaataactaaaaaaggcaattctgattttttgaaaacagcacgcaaaacaaatgaaactgctgaccctaacaatccgttaagatgcatttttatttgtttctgttccagtaattgtgtggcaatctgctgattttttggcagatcatcatacagggtatataaggcgtttttactcaacttttggtgtgtttggatctatatttttccccggaatcggagctgtagtttcgtttgggatagcacgagcggtatctaacattcttaagaaatcttcctcaccttcttctttcggaattttactttttacattaacaacatccatctgtctttctaatgaaaccaactctttgttgatctcaccaattaaaaatgtcactttctccgaaggaatctggttcagatgaatgaataaatccatcattctgactttggtaatcaaaatagaaatccggcttctgatctgaggaatattaaattcaggaggaatattagtatttaaagccattgctttttttgaaatcgctgctgactttttttgaaatgctccaattgtttttctgggtttatctctgagttcgttcaaaaagtcacgccattcaatccatgaattcactttttgctccgagatttcgttgattggctcatcgataaaagaccagcttttattgattttattaaaaatgacttcgtttttcttggcttccttttcattttcagcgcggcgtttttcatcttcattctgacatgaattcaatacaaaaacaaaaagcaaaaaaagagatatcttatatttcatttggtaaaacattaagctacaaagttacaaagtaattttacaattacgaattctgatttttggtacaaattacattatttagctgctattggaccgaaacaggtttagaaattcttggttgtaagacttatggaaaaatcctgaattcctgatcgaaaatacttataatttacaacttgcgttccacattcaacagcgaataatctaaaaaagaatctttatcattgttaaatttacaatttgttctccttaaaagcgaaaacatttgcgaaaacgttatatttgtctctcaaaaaaactattcaaaaaatgaatccaaaaatattaatcatcggtgcctgcggtcaaattgggacggaactgactcaaaaactgcgcaaactatacggaacagacaatgtaattgcttctgacattagaaaattaaatactgacgttgtaaattctggtccgtttgaagtagtcaatgctttagatttcaaccaaattgagcatcttgttgaagtgcatcaaattactgatatatatctgatggcggcacttttatcggctacagccgagaaaaaccctgcatttgcctgggatctgaatatgaattcattatttcatgttttaaatttagccaaagccaaaaagataaaaaagatattctggccttcgagtattgcggtttttggacctactacacctaaggaaaacactcctcaatatacggtaatggagccttctacagtttacggaattagtaaacaagcgggagaaagatggtgcgaatactaccataatatttacggagttgatgttcgaagcatccgttatccgggcttaatcagctggtcgacgcctcctggtggcggaactacagattatgctgtagatattttttacaaggctattgccgataaaaaatacgaatgctttttatcctctgaaacaaaaatgccaatgatgtatatggatgatgcaattgatgctaccattaatatcatgaaagcacctgcagagaaaatcaagatacattcgtcatacaatttagctgcaatgagtttcactcctactgaaattgctgcagaaattaagaaatatattcctgaattcgaaataacttacaaccctgatttccgtcagaaaattgcggacagttggccggctagtattgacgattcagaagccagagaagactgggactggaaacatacttttgatcttgaaacgatgacaaaagacatgttagagcatttaggataacatctgcttacaaaataaaaaaacgcacaaatgtgcgtttttttatgcttctcatttgctcaccaatattccccattaaacagatgaaaggagatttttctattcttcttcatttggttcctttttgagaaaataatctattaataaaaaagtcccgtttaccatttatttctaaaattaaacgggactttttcatactccttctttctccggaatggctgtttgcttttcgatcaataaaacggtcttttctattcttttcaggagtttaaatatggtgatgaaagacaccggatctgcgccgagattctccgaaattaaaaccttatccgctttccttttatctttaacgtctaccaacgcatctatactaacattataaaaaacggctattttctttaagtttttataggttggataaaagatatcgctttcccattttccataaattgtttgtgaaactttcagaataatcgaaatctccttttgcgacatccttttttctcctcttaatttttgcagcttagtaccaaaagtcattttgttttttttgaagcgaatatactacaaatacacctttcctttctcatttaattgttaaaaattataagaaaattcttggttttgttttttatagatattatgtcttaaacactattgacacctcctcttcatcacgctccaaaccaatgtaaaaactataattgtaaaaaagcaaaaaagccaaagtgagcagaaactaactttggctttttttatattttaaagtgactattatttcacctcataaacattattcgctgcttttacatcggccattaatccgcttggatcaatcgtgattttcttaatggcagttttgttcttgtctattgtaaaactgtagttcgattgtgcccaggcccagtcgtctaaaacggttctttttacattcgggtttggatttggcttgataaagttcatcattcttaatggaatgtaaaaactctcagtagttccgtctgtatattccactgttaaatcaatcggcatcggcattcttccaattctttctaaagtgatattggtttttcctgcattatccgctacttctttgataccataatcaattgtattggtcgttcctgtccaatcgattaaataccaatctaattccgctcctgaaactctctccgctgatcttttaatatcatttggagtagggtgtttgaatttgaaatcattgtagtatcttttcaaagtagcatctacattatcttttccaattacatattctaattgcgacaagaaaagacttccttttacataagaagaaatactataaggtctgttttcatcgtaacggtctccatgagtggtttgtggctgctcttttccggaattaaccaggctgtaataagcagcataatttcctttaaacggattcacttcttttttatcgcctttcaattcattcaaagcactgtcttcgatgtaagtggtaaaaccttcatccatccaagggtgttttgattcgtttgaagccagaatatgctgaaaccaggaatgccctaattcatgagttgctgttcctaaaattccttcaagagttccgtttccaagcattagggtacacattgcatactccattccgccatctccaccctgaataaaagaatattgtttgtacggatatgctcccactctgtggttgtaataatccattactttcaccattaaaggttctaattgtttccaatttgcagttgtttttggattgtttttgtagaagaagtgcaaatcaacatcgtttggtccttttacaatatcatgtgtgtattctttatctgctgcccaggtaaaatcatgaacgtttggtgcaataaaatgccaggtcaacgtttttgttttctttggataagtaacggttacacctgcatcttcataaccgtgacctatttgattcttatcttgtaaatatcctgaacctccgatagtataatctttatcgattgtaattttcacatcaaagttcccccacacgccatgaaattctctggcgatgtatggatctgcatgccagccttcgaaatcaaattcggctaattttgggtaccattgcgacattgacaattctactccttcagcattattacgtccagtacgacgaacctgaaccggaacttgtccgtcaaaatctaaagtaaaggttgttttagaatttggtaaaattggtttcgccaatgtcacttctaaaatagttcccgaaactctcgtttgtgccgaaactccatcttgtttaaaatctgaaacttttaaatacccaatttcatttggttttaaagtttcgattcggctttgtttggtttctttaccgtctgcgccttttactttatttaccattcttccatcaggatcttttatagaatgcaaacgagcatccatttcacttcccggctgaaatgcatttaaaaataaatggtaatacactttctttaaagtatcaggagagttgtttgtgtacactaactcttgttttcctttgtactgatagttttttacatccatggagacttccattttgtaatcgacatgttgttgccaataaggagcgctttgtgcaaatgctgagtttaaactcaaactcaaaaaagatagtagtaaaatttttcgcatggttatttcaatcaaaatggaagagcgcgaactcttccattacattagtattctgttttgtttattttttagacattttttcggccatcaataaagcattgtaagcgttgaccattttagcagttcttgaagattctgtcgaagaaactgctaccggttttacttcaggatttggattttcacccaaaactaccattgacggaagtgctactcctgaatccattaggatttgtttaacctgagctgcttttaatttcggatagtacgaacgtatcagtgctgcaactcctgctgcatttggagaggccattgaagttccctgcaggtatttgtatttgttgttaggtattgtggcataaatttcttcacccggagcaaaaacatctacgtttatttttccgaagttcgaaaatccagctacaaccatttctccatactctttcttcagtgctccgattgtgattacattatcagcaaactctttaacgttatcttctgagtcatttggataattgatgtttttggtttcatcaatattgtatccgtcatttccggctgcatgcactattagaacatctttttttgctgcatattttattgcatcgtatacccattttttatgaggagagaaactttttccgaaacttccgttgatcacttttgcaccattgtcaactgcatagcgaatccctaaagcaatatctttatcgtactcatcgccatccggaacggctcttacggtcagaatttctacattattagcaactccgtctccccctaaattattcccgcgaacctgcgcaataattccggctacgtgtgttccgtgaagcgcttcctctttatccggaccaaaaacaatattatttccataacgtgtgtttttaatatcctccggattatcacctactatttttcttccgtcgaattctttatttaagttgtaattcaactgaccgtaaacctgcttgctatactcttttaactcagaatcagggtcaaaagttgaccctgcattcgttaaaatttgagtcatgatttctttgctctgagctacttttggatctgtagaagttatagcatctaaatcctcaattttataggttgttttattaagttctttttgtatcgttttatgaacttctaacaaaaagtcagattgctgtttgtcgcgtaaagcgtcttcgtatttcttggtgtattgcgccaaagcctctttatattcgggagatccgtcatcaccttttttaacgacacgcgttaattcaagattttcgtgaacagcatttcctaagaaattccatccgtgaacatcatcaataaatccgtttttatcatcgtcgattccgttacccggaatttcttttggattcgtccagatcatccctttcagatcttcatgttcgatatcgacacctgaatctacaattcccacgatcaccttctttccggttttcccttgcagtaattcagcataagctctatcgacactcattcccgggatcgaatctttgattaaatcaagatggctccatctttttaattcattttctgaaacaggagctttcttaacaacggctaaaggagctttgataaaatcttttcttgccgattcctgtgcctgtaaagtagtgctgcaacctgccaaaacaagtaatgcaaaagcagataatttgagatgtttcataggactcatgtatctaataagtattctaaagttaaattatgggtctaaattatgattttttgttacataaagctaacgattaacactgtgttatgatttttgccttaacatttaagaaaccttaaggcacttgtaatcttcatctgaatcaaaaatcttacacgatttattctctcagaaaaacagcacgttaggcttactcttttttaatcttttaaaagaaccatggccattacgccttcccgtaaggaaatacaaattaatttttatagacttgtgcgacctaatgataaatcctctctatgaagacaaaactactcttattgctattactagcaaacctttccattaatgcccagactaatttagtcccaaatggtgaccttgaaaattggtcttcctcatcacaacccgataactggtatcgctattttagtggatttatttctcaaagtacaatcgctcaaaaaggttcctcgagtaccaatatgaagatttccagcggtacatttaactatattaatagcgaattttttccggtaacagcaagtaaaacataccgaataacgatgtaccacaaattagtttccggtacattttcgaaacttgatttcagtgtatatcataaacccggtgcttttaaagctgagattatcaaaaaaactgatgccgtgttttcaagctcagaatggagaaaaatcgaatttgagtataccccaaccgtaagcgaaaacatagaaatcgatatttggaccacaggaacacagaattctgaaattttagtcgataatgtttctgttgttgatattgctgatgttccttcgccatacaccctaatacctgatgtgaattttgaaaacaagttaatcgcattaggaattgactccggaactgcggatggaaaggtattaacttcaaaagtttctactatcactgaaatagatctttacaatagcaatattactgacttaaccggaattcaggattttatcaatttaaagaccttagattgcggtggcaataaattgttagctttagatgtcactaacaatacacaattgactacattaagatgtaatggaggcagcggaagctcaaccactaggggagatggtcaactaactaatttaaatgtctctaaaaataccttgctaacttttctagattgcggtaacaatcaaattacaaatttgaatatttctcaaaacacgttattaaaaacattaatttgtaatattaatagattatcatccttagatacctctaacaatatgctactaacgttggtggattgcggcgcaaatgacatcaatacgctagatttttctaacagtgaatctttacaaatactccgatgttcagttaataaattgacaacaatgaacatcagtaataatcgcaaattaattgagttagattgtatttctaatctattaacaagtttagacatttctaaaaacccagatttaacacgtgttcgctgtggatccaataaaaagttatcaagcttgaatttaaaaaacggaacaaataaactcctgaaattaacccttgcaaatattatgttttgggacaatccaaatctaaaatgtatcgaggttgatgatgttgcttattcagaagcaaattggagcgatgtgaaagatgctactgcaacttattctaattcttgtaaaacattaggtattgataccaacaattttgcaaaagcaacaatctatccaaacccaactaaaggcgaagtaaacattcaaaatgcaagtttagaaaaagcaactgtttacaattcattaggccaattggtaaaaacatttgttcttaactctgatgataccaataatgtaataaacttatacggtttaccaaaaggagtttattacatatacttaataaataaagatgcagcttcagctaaaaaaattattgtagagtaattataatttgttgaattaaatttgttaataaaaagtcccactttcgacatcatgaaaatgggacttttttgcatttatagctttaattttaaagaatgtcttcacaggtaaatacttctttcaaccgaacacctttttcagtatgttctaccgttatgatttgattgtgggcatcatgttccaaaaacaaataatagttgttgtctgccgctgcatttaaaaactttgatttctccggcattgtcaataacggcctagtatcgtaacccatcacgtagggtaacggaatatgccctgctgtagccagcaaatcggcacaaaaaacaatcgttttatcctgatacttaatatgtggaatcatttgcttttcggtatggccgtccacataataaattccaaaattcatttcttcagaaaagccgaaatcactttcgggacgctttataaaattcagctgtccgctttcctgcataggcagaatattctctgaaagaaaagaagctttttcacgggcattaggtttcgttgcccattcccaatgattttcattcgtccaaaactttgcatttttaaaagcaggctcgtaaaaagtccggtctgaattccattgaacacttcctccacaatggtcaaaatgcaaatgcgtcataaaaacgtcggtaatatcgtctctctgaaaaccatattttgctaacgatttgtctatcgaatgcgatccccacagcgaataatagccaaaaaacttctccgattgcttgtctcccattccggtatcaatcaaaatcagacgatttccgtcttcaataagcaggcagcgtgctgcgatatcaattaagttattagcatcggcaggattggttttgttccagatggttttcggaactacaccaaacatggcgcctccatctaacttaaaatttccggattctatagggtaaagtttcatgagaatagatttttaacaggaaaacaaaactaggaaatactatttcatttttacaacaaaccatcataaagtcttcaaaaaacaataataaagtctcattcttttatcaatataacatatatctattttaacatttgttataataatgtgaaccgttatggaaaaaggtttttaagtcgtatctttgccgataatttcatttcaacattgaaagacagcactttaaaatcgtaatcttcggattactatttttaagagcaaaattggagtgaaaacaaaaacaaacacgataaacaatgataaaagtttctgatacagccaaaaataaaatcatcgatttgatgaaagaagatggttttgatgctgctagcgactacgtaagagtaggcgtaaaaagcggtggatgctctggtttgtcttatgatttaaagtttgacaaaaccaaaggcgacgacgataaaatattcgtagacaacgacataacaattgcagttgaaaagaaatcatttctatatctggccggaacaattcttgaattttcaggtggattaaacggaaaaggttttgtattcaataatccgaatgcaagtagaacttgtggttgtggagaatctttttcactataaaataattaaacgattgcaaaatttaaagatttaaaaattacagaagtgatgttatttaaatccttcaatttttgaatctttcaataaagaaacaatgagcaaatacacagaagacgatttaaaaatcgaactcgaaactaaagaatacgaatacgggttttatactgatattgaatcggagacctttcctattggcttaaacgaagacatcgtaagagcaatttctcttaaaaaagaagaaccagaatggatgactgactggcgcattgaagcttttcgtgcctggaaagaaatgatcgaaccggaatgggcaaatgtacattatgcaaaaccagatttccaagccatttcatactattctgctccaaaacaggtagatccaaacaaaactttggatgatgtagatcctgaattattagaaatgtacaaaaagttagggatctctgtcgatgaacaaaaaatgatgaacaatgtcgctatggatattgtagtcgattctgtttctgtagctacgaccttcaaaaaaactcttgctgaaaaaggaattattttttgcccaatttcagaagctataaaagaacatcctgaattagttaaaaaacacttaggaactgttgtacctcaaaaagacaacttctatgcagcattaaactcagccgttttctctgacggaagtttttgctatatcccaaaaggtgttcgttgcccaatggaactttccacttatttcagaatcaatcaggcaggaactggtcagttcgagagaacactagttattgctgatgaaggaagttacgtttcataccttgaaggctgtaccgctccaagccgtgatgaaaaccaattgcacgctgctgtggttgaattaatcgctttagatgacgctgaaattaaatattctaccgttcaaaactggttccctggaaacaaagaaggaaaaggtggtgtttataacttcgttaccaaaagaggtttatgcgaaacaaacgctaaaatttcatggacacaagtagaaacaggttctgctgtaacctggaaatatccttcttgtgtattaaaaggagacaactcggttggagaattttattcaattgccgttaccaataattaccaacaagctgataccggaactaaaatgatccatttaggaaaaaatactaaatcgactattatttctaaaggtatctctgccggtaaatcccaaaacagttaccgcggattagttcagattagtccaagagctgaaaatgccagaaacttttcccaatgtgattctcttctaatgggaaacaattgtggtgcgcatactttcccatatatcgaaagtaaaaatccatcagccaaaatagagcacgaagcaacaacaagtaaaattggagaagatcaggttttttattgcaaccagagaggtatccctactgaaaaagcaatcgccctaattgtaaacggtttcagtaaagatgtattgaacaaattaccaatggaatttgctgttgaagctcaaaaattattagaaatttctttagaaggatctgttggttaattgcgagatggaagataaaaaagtaatcattttaggttcctctagaaaaaacggaaatacaaccagaatcgcggatgaaatttctaaagaaaccggaatagaagtaattaatctgagtgattataatatttcttattatgattacgaaagtaaaaacagagaagatgatttttttcctttaataaaaggtatcatcgagaagtatgacactttaatttttgcaacgcctatatattggtacaatatgagtggaatcatgaaggtattctttgaccgcttttcggatttaatccgaattgaaaaagaaaccggaagaaaactcagagggaagaaaattggtgtgatctccaattcacacgataatgaaattgaagagagtttttacattccgttcaaaaaatcagccgattatctaggcatggaatatttaggacacgcgcattttaatgccaacatcctaaacgaaacaacaaaaatagaattgacatttatataaaataaaaagacaatgttatcaataaaaaaccttcacgcctcaattggtgataaagaaatccttaaaggaattaatatagaagtaaaagctggcgaagtacacgctatcatgggaccaaacggttcaggaaaaagtacactttcggctgtaattgccggaaacgaaaactatgaagttactgacggagaagttttccttgacggagaagatcttgctgatcttgctcctgaagaaagagcacacaaaggagttttcctttcttttcaatatcctgtagaaattccgggagttagcgtaactaacttcatgaaaactgccatcaacgaaactcgtaaagcaaatggtcaggaagaaatgcctgcaaacgaaatgctgaaagtgattcgtgataaatctgaattgttagaaatcgaccgtaaatttctatcacgttctcttaacgaaggattttccggaggagagaaaaaaagaaatgagatttttcaaatggcaatgttagagccaaaattagccatccttgacgaaacagattctggacttgatatcgatgcccttagaattgttgccaatggtgttaacaaattgaaaagcgacaaaaacgccatcatcgtaatcacacactaccaacgtttattagattatatcgttccggatttcgttcacgttctttacaacggaagaatcgtaaaatctggtggaaaagaactagcctacgaattggaagaaaaaggatacgactggattaaagcagagaattaagaccgtcataaagtcaaaagtcataaagtcgaaaaaaaaaacatgagtaagtttaaatcttttgaagaaataaattcatggcagaaatccagaatcttcaataagaaaatatatttgattactgaaaattctaatttcaaaaaagactttgattttgttagacaaataagacgtgcatcactttctatatcatcaaatatagcagaaggttttgagagaaataccgataaagagtttgtctactttttatatgtagccaaagcatccgcaggagaagttagatctcaattgtatttagcttttgatttagaatatattttaaaagaagaatttgaaatgcttttagaatcggtaacagaaatatcgaaattattgagcggtttcataaaatatttgagtcaaaagtcataaagtcgaaagttgtaaaatctttttagactcaacttaatttatgattttttcacaaaaatagtcgacaatccaaagtctttcgactttcgactttcgactttaagactaaacaagaaaaatggatttaaaagaaaaattagtatcgtcttttatggcttttgaagagcgtgtcgatgtacattcagatttgcatgacattcgcaccaaagcactaaaaaactttgaaaataaaggtttcccaaccaaaaaggaagaagcttggaaatacacatcgttaaacgccatcttaaaaaatgactttacggtttttcctaagcaggaaagtgccatcgaatttaatcaggtaaagaaatattttttacatgaaatcgacacttataaattagtgttcatcgatggtgtttttagctcgcatttgtcttcaactacacatgacggaatcgatgtttgcttaatgtcttcggcattgaccaaaccaaaatataaaatgatcattgatacctacttcaatcagattgcaagtaaagacgatagtttgacttcgttgaatacggcctttgcaagtgaaggagccttcatcaatatcccaaaaaagaaagtagccgacaaacctattgaaattatgtatttctctacaggtaatgaaactgcattaatggttcagcccagaaatctgattattgttggtgaaaactctcatgttcaaattatcgagcgtcaccagagtttgaatgagaatcccgttctcaccaattccgttacagagattttcgctcaaaaacgtgccattgttgattattataaaattcagaacgataatagcgaagcgaatttagtagacaacacttacgtttctcaacaacaggaaagtcatgcttatgttcataccttttcgtttggaggaaacctaacgcgtaacaacctaaacttttatcattttggtgaaagactgacaagtacacttaacggaatctcgatcctaaacgacaaacagcacgttgatcattataccttagtgaatcacgcaacgccaaattgcgaaagtttccaggattataaaggaattttctctgatcgttcaacaggagttttcaacggaaaagttttagtagagaaagaagctcaaaaaacaaatgcttttcaaaaaagcaacaacattttattgagtgacaaagctacgatcaatgccaagccgcaattggaaatttttgccgatgacgtaaaatgctctcacggttgtacggttggacaattagacgaaacagcaatgttctacatgcagtcacgcggaatcccgaaaaaagaagctaaagctctattgatgtacgccttctcaaatgccgtaatcgaaagcattaaaataccggaattaaaacaacgaattactaaaatcatcgctatgaaattaggcgttaatttaggatttgatttgtaaaataatttaaccgcaatcccgatagctatcgggagcaaagagttacgcaaagttcgcagggtttagttttaaactttgcgaactttgcgctttttacttggcgtcattgcggttaaatttatttttttactgaagaaataacctccttcaaaaattcattaaaatcaaaataatgttctccttcattcactcccatcctaacaattaccatatccagagacggaataatcgctaccatttgtccctgatagccattacaataaaacatatcacgaggtgcatcgggaaacttccctccggcatttaaccaaaactgagctccataacctccatttgaagtattcgttggtgttgccgtatactttacccaactctcgtctaagacctgctctccgttccagtttcccttatgcaaatacagtagtccgaattttgaccagtctctcgctgttgcccatgcataagaagatccgacaaatattcccgacatatcctgctccacaatcatcgagttcataccaattttatcgattacagcactgtaccaaaaatccaggtattcttgttgtgttttaaactgacttcttaaaattcgggacaatagattagtagttcccgaagagtaataccaatgtgtattaggtttaaatttagcgggtttatccatttgtactttccccatatcttctgcctgaaaaagcatttcagtcgcatcacaaattttggtatagtcttcctcccattctaaacctgagttcatatgaagcaaatcattaacggtaatatttttacgatcgtcatttctccattctgcaattggagcaggcttataaatgtccatttttcgttgttgcactaaaacgccaaaagccgaactggtgatacttttagtcatcgaccatcctaaaattttactgtctttattaaaaccagtatcgtatttttcagcaatcaatttatctttatacaccactaccacggcacgcgaacgtttattcttttggccttttccatcaaacgaaccgtccacggcctttttcagtttggcatagtcaatatttgaaaaagtggtatcctttggttctttattcccataaggaaaagaaagattgttaaccaattttgttctttttggaagcaggtacggcttcgaaatatcataatcatcgtcaatcaaagtagcccccagtccttctctgtaaattgcttttctttctttcagtccataaactgtagaaacagcaaacttaccggcatcatcaatagtattctcggctaaatcaatcatgtggatatcattatccgttttttcgattaattccttcgaacgattgtcaataaaatgacctgatgcaacactcttggccgagaagcctgaaatcaaatccagcttgggataagtagtaaacccaaaatacaaaaaggcaagaactaaaacaagtacaagtaatttaagaattcttttcatctggttgtggtatttttaatgcaatataaatattttacaatcaagattatacaacttattccagaaataaaattcatgaaatataaaaaaaggaatcaatttttaaagaatctgtaggcaaacgctcaattgatagcatcataaaaggaaattatagttttaatggataaaccaattttgttttagtacttttgtagatagaatttttctaaataagacatgttagacatccaaaaaataagagctgattttccgatactttcagaaaaagtgaacggaaaacctttagtatatttcgacaacggcgcaacttcacaaaaaccacaagttgtgattgatgcaatcgcaaaatattatcaggaaataaatgccaacattcatcgtggcgtccatactttaagccaattggctactgatgcttacgaaatttcaagagtaaaaatccaacatcatatcaatgcgaaattctcgcacgaagtactttttacttccggaacgactcacggaattaacttagtaaccaacggttttgcttctattttaaaacccggagacgaagttattgtttcttcattagagcatcacagtaacatcgtgccttggcaaatgttatgtgagaaaacaggagcaactcttaaagttattccaatgaatgaagaaggagaactaataatagaagcttacgatgccttattgtcagaaaagacaaaagtggtaacggtaaaccatatctcgaacgcattgggaattatcaatccgatcaaatacatgatcgaaaaagctcatgctgtgggtgccgctgttttgatcgatggtgcacaggctgttccacatttaaaacctgatgttcaggatttagattgtgatttttatgctttttcaggacataaaatgtgcggaccaacgggaaccggaattctttatggaaaagaagaatggctgaataaattacctccctaccaaggtggcggtgaaatgatcaaagaagttactttcgagaaaacgacttatgccgatttacctcataaatttgaagcaggaactccaaatattgccggcggaattgttttgggaacggctgttgattatttgaaccacattggttttcataacattcatcagcatgaaacacatttattacagcacgcaaccaaacgtttattagaaatcgaaggattgaaaatttacggaaccggaaataaagcctctgtagtttcgtttaatattgatggaatccatccgtacgatatcggttccattatagataaattggggatcgctgtgagaaccggacatcattgcgcgcagccaatcatgaattttttctgcattccgggaacgatccgtgcttcattttctttttacaataccaaagaagaaattgacataatggtggaggccattaaaaaagcgaaagctatgttaagctaaaaaaatcttttatgaggatattatctttgttactcttaactttttttattggaacaagctgttccagccaaaaaaaagccgacatgaaagctactgaaattgaatactctgcagtttcccgaggcacttacaaagtaatcgtggtgcagaataaaacggtttcagtaaccaatggccgtaatgctcagccggtggagagcaaaatagaggatctaaaatggaagcagattgtaactgaattttcaaaaatcaatctcaaaactattccggaattaaaaggtccaacacaaaaacgctttcatgatggcgctgctttgggaaacttaaaagtcactcagaatcagaaaatatatgaaactcaaggtttcgacaatggatatccgccaaaagagatagaaaaattggtaaatttgctgctggattttacgaaagaataattatgacaataaaagagatacaaaacgaaataatagacgaattttcgatgtttgatgactggatgcaacgttacgagtacatcatcgaattaggaaaaagtcttcccttaatcaaagaagaatataaaaccgacgacaatttaatcaaaggctgtcagtctaaagtttggctgcaaggagaacagaaagaagaccacattgtctttacggccgatagtgatgctattttaactaaaggaattatcgcgattttaattcgtacattctccaatcaaaaagcatccgatattttaagcgccgatgttgattttattgacgaaattggtctaaaagaacatttatccgcaacacgggcgaatggcttggtatcaatgattaaaaacatcaaaatgtacgcattggcttttgatgcaaaaaataaaaattaaaaaaaaataaaccctaaagagattaagtttcataaagcgttaatcttaatatcttaatggtaaaaaataaaaacacttagtgttgaaaaaacaaaaacaatggaacaagaaatagacacaaatgaattaggagaatctatcgtaaaagttttaaaaggcatttacgatccggaaattcctgtagacatatacgagttgggattgatttacgatgtaatggtcaacaccgattacgaagtaaaaatcctaatgactttaacttctccaaactgtccggtagcagaaagtttgccaagagaagtagaagaaaaagtaaagacaattgaaaacataaaagatgttgatgttgaaattactttcgatccgccatggagcaaagacttaatgagcgaagaagcgaaattagaattaggaatgctttaataaaaacagtcataaagttaaaagtcataaagtcaaaagttaaagactttacgacattcgactttaagactttaggactttcacatggaagaaatcatcaataaagttgccaatagtgccttggaggtatttgatcttgaagattattacccaaaaggagcacgtgtgcaaatcgatatatcacaatggcttttagaaggttttttattaaaagaaaaagactttagagagcatttaaaaaatcacgactggtcgcaatatcaagatcaatatgtagcaataaattgcagtacagatgcaattgttcctgcctggtcttctattctggttgcagtacatttagcaccatacgctaaaaaagtggtgaacggaactatagaagatctggaagcaagcttatacgaagaaatattaagcaaacttgattatactccctataaaggcaaacctgttatcgtgaaaggctgttcccgcaaacctgtacctacccgtgcctacattttagcagcaacctatctgcagccttttgcaagaagtatcatgtatggtgaggcctgttcggcggtaccattatacaaagaaccaaagaaataacactccttaccagctgcatcccataaggctttttaacgattatttagtatatttgttcttacacatttaaaccagatatcatgaaaaagctagcattattactccttgttttagcaaactttacttttgttcatgcgcaaaattcagaaaaagaactaatccagaatactgaaaaagcagtaaaaaaaataaatgatactatcgaagatgaaggatggaaggcaaaaggtactgtgtctcttttactaaatcaatccagctttaacaattgggttgccggaggtgaagacagcttctccggaactttaggaatcaattatgactttaactataaaaaagacgatctcacctgggacaacaagattctggcttcgtatggtcttttgcaaactaaaaatgccgatttcgaaaaaaagactgatgaccgtttagaatttaattcaattgcaggaaagaaagcttttggagattggtattattcttactttttaaatttcagaacccaatttacaaccggttatctgtatgggaaggatgtaaacgggaaggaaatccgaactgaaaacaccaagtttatgtctccggggtatctaactacaggacctggtatttactggtctaaaacggagaatctaaaaataaactttgctcccctaacttcaaaattcacttttgtagaccgcgcttatacttcgggaattgatcaggcaaccgggcttccttatgtagacggggcctactttggagtagatgctaataaaagcatgttatacgaactcggattttatgcttcggtttattacaaactggctattatgaccaacgtaactgctgagaataccctgaatttgtattctaactatttaaaagatccgcaaaatgtagatatcaactactcattgaatgtcatcatgaaagttaacaaatttctatcggcaaacttatccttccaggccatctatgatgataatgctttcagtggattccaaaccagacaagtatttggtgtaggcattaattttgggttttaaaaatcacaatacaaaataaattctacaaacaataaaccctctcctatatcttcataatacgttaattataagaagatctaaaacctaaaaaacgatagaagctaaaatttctatttttcttatacaccccctttttctttattgaaatagtgggtgttttttttgagttttatcgagcacctaaaacacataaatattacaccaaattatacttatggattagttctacatgatatagattttttcgcattactaaagtactgcaataaattgcagggttttaaacccgaatctgagaccaataaaaagagactgtatcccaacggatacagtctctctctttttatagcagcctaaattactgttttatgattttttgggtgaaagttttcttcgctgaagaagttacattaagaaaatatactcctcttgttttccccgataaattaattgttttttcggtgttgtttcctccggcaaaagtttcggtatgaatcatttttccttctgcgctatgaacggtaaccgtataattgtcggccgtagatggtgttaccacatgaaaaacattagtggaaggatttggatatacctgaacccctttcagattgtttatttctcttggtttcgttaccgtcaaattagggccgttatcaatttttaaattatcaaaccagattctcgctccatacccggaagtatttttaaatttaaataaaacatttgtttgctgttttacgatactcagatcaattttttcggctctccaatcggaatctttggttggaatccaatcgttcgtttcatttgtttcggttgttgcaggattgtcctgaattggaggtgaaaccgtttgcaactgtatttgatttttagaatatacattcgtccaggtaactccacaatctgaagatacaagaatatcaatcttgtcgggcgctggctcagggtcatatacgcttaaatactgcgtataagccagatcaaaatacaagtaaggtgttgctgcggaagaaaaatcaactgcttttaaaattagttcatcaaccttagcggttgggttatcggcattattaattaccagacaggacagatctcctttgcccacatccgaacgtttttcccatgtaatggcatcctcacccggattaatgatttcccaatcctgaatcggaaaactttcctcaaaattttccaagaatggaagactgtttttacttttgaccactacaacaccggtttttgtcaccgtagatcccgttccatttgcattagaagctgtcaaagtcacattgtaagttcccggactatcataaactacagcaggatgtttgcttgttgaaaaagaaggtgtccctcccgggaatgaccatacccaggcagtaggttctccggttgagttgtctttaaatgcaatcggaagatcactgcactgcctttcatttttaatcaaaaattctgaaaacggagtttctttgctatcaaaattgaatttcaaattatcaatccaaattctcgctccatacccggaagtatttttaaatttaaataaaacatttggttctcctttaaaatcagaaagaatcactcgttcggttctccaatgtgaatctgaagttggaatccagttgtttgcatcgttgctgacaaatgtttccaattcagtgtgcgtttttttataaacactttcccaggttacaccacaatcttttgaaaccaggacttcaagaacgtccggactcacagcatcaaacttggcataagcaacatcaaatgaaaaatcggttattccaaccgatagatctgccggtttcagaatgatttcatctacttcatctactttctcattatcagcattattcattaccatacaagatgtagaattatgccctactcctgtacgctgttcccaggctaatttgttatcggggttaataatttcccagtctgcaggcggaaaagaaccttcaaaaccttcaataaaagaagttttataaggatcaacaatagttataaaattgtttctggtaagtgttgtccctatgccttttgcatttttagtagtcagtgttacagcataagatcccgatacctcatagactactgttggattctgatctgtagaacttgaaggtgtccctccgggaaacgaccaattccatgaggtaggatttcctgttgaaacatctacaaatggagctgtgatactggtacagcgtgtatctctcatactggatgcaaaatcagaaaccggagtagcgacctgattaacagcaacatttacattatcgatccaaattcgcgttccataacctgatacgttcacaaaacgaatagaaacattgctgttcccgatataagcagtaagatcgactacttcttttcgccaattggcatctgtaaccggtatccaattattggcctgtgcggtaggaacggatgtggtttctaataatgtgtgtgttttcgaataaacatcattccaggtctgtccgcaatctgtcgagacctgtacttttaaaacatcagggcttacatcatcaaacttggtataagccacatcaaaatacatttgactgttttgtccggccgtaaaatcaaaataaggcaatctgatataatccaaagttcccaataccgaattatcagcattgttcatgatcatgcacgaactgtcataatgccccactcctttacgcttttcccaaccaagccctttgtccggatttgtaatttcccaccccgaaggcggaaaagcacctgcaaaactttccgtataatttgcatttgatttttgatctacttcgatataattggatacttctttcgtatttgttccttgtgagttggctacttttaaagttactttatactttcccgatgtgttataagtcaccaccggattttgatctgtagaggttgccggagttcctccttcgaatgtccaaactcttgaattgggcaatcctaaagaaacatctttaaaaacaatacttttacctgcacaaatagcggtggtactactgttaaaattagccgtcggattgctttcaataacccctactgcactaagattagcgggctcccataatacccctcttggatatttagcaaccgttttgtcttctaaccaataggtcattgcattcgtctgatcgcgggtatacatattctgacaattggtattatagtccatgtgattttcggcattggcataaactccacagctgtttagtacgtttctggtacaaccttcggcaactttcgtaggaggagtatcggccatcccgtcgtttaccggatcacaatcgtcctgaaaagtgtgtttcaatccaaaataatggccaaactcatgtgtcattacctttgcaaaagtagcactcgcgtgagatccgcaggtactcccaatgtatctgtgattgaaagccacacgcggtatggcatcctgaatgggtaaaaaagcatgtcctgaaccagtaggcccctgtcccgtattgggttcatccaccaccaaaacatccagataatacctgttgtttttaccataccagatgtagtcataaattttagcatcatagccgtctgaaacatgtgcctcgggatgccagtctaaacccggaatttctaaaggattgccctccggatctacggttgccaagacaaactgaatgttcagtttacttttaacagcgtcaaaacgaggatcggttgtagcatactccggaaacaaaccattaaaatccttatttaccgttagcagcgcatcgtctattcggcatttcatctgctctttggtaaaaacattattaatattagttccgtcggccagaatgtgaaacacgaccggaaccatataaggaacagtagcggctttctttgtattcccttttttccaggttttaattttagaaagcgatttcataaatgcggtctcttccttttgggataattgggttccacaaccaattgggttctggttttgcccaaaagaaatgcagcattgaagcagaaaaactgcagcaataaagtagttttttttcaaaataatggtctttttgttaattgttattccaaatataaaatcaacaggtaatttgttaaaaagattaatttttaaaacaaataaatctttaattattcatatttgatagtttttttttataaaattatttaattaacaactgaaaaaaagatattatcttattgtaaaataattgtatgttatctagtttttattgtttcgaccaatccaaaaaagaaaaaacatcattctaaaaatgtgtttttcacacaattcagaactattttgaaaaagaagtaaaagaactctttcagcatccgaatacattatcttaaaaactaagaaaaaaactactattgcagtactgaatttagaatcgcctgaatgagccagatttatgctactttagacacaaaatcactctaatctccaaaacaaagattcctaatatcttaatttctttgttttttttaaatatattcttcctgaaaattcataaaatttagtagcaaaaaaaacctccattttaaatatcttagcagaatattaccatcctaaataaaatcaacaaaaaatggctgagcaatcttcaatccagtgccccaattgcggcacaccaatcgatgtaaatgatgttttgaaacatcaattggaagatagtatccgtaaagaatttcaacaaaaagccagtgctcagtccaaagagctggaacttaaaaacgagcaattcgaaaaagcaaaagctgaatttgaggccaagaaaaaacaggaaaatgaactttttgccgaaagactggaacgcgagagaaaaatagccgaaaaagaaatttctcagaaattaaaaaccaaactcgaagaagaaaacaaagatcgtttgcttctaatggaaaaagaactttcagagaaatcagagaaacttcgcgaactgaacaaaatggaaggtgaaattgcgaaacttcaacgtgaaaaactcgaaatgaaggaggctatcgaaacggaagcgcaaaaacagcttaacgctactttgattctggaacgtgacaaaatccgaaaacaagaagaggaaaaaaacgaactaaaaataaaagaataccaaaaacagtctgatgatcagaaaaagctgattgaggaaatgaaacgcaagcaggaacaaggctccatgcaattgcagggtgaagtcatggaacttgcgattgaggaatggctggccagtaattttccgttagacactatcgacgaagtaaaaaagggagccaatggagccgactgtcttcaggttgtaaatacccgagaagtacaaaattgtggttctatttattatgaaagtaagcgtactaaagctttccagcctgcatggattgagaaattcaagaatgatatccgaaccaaaaaggccaatattggtgttttggtcactgaggtgatgcctgccggaatggatcgtatgggtatgcgcgatgggatatggatttgtacttatgaagaatttaaaggactaagtgctgttttacgtcaatctctcatacaagttagccaggccgttcaggcacaggagaacaaaggagataaaatgtctatgctctatgattttttaaccagcaatgaattccgcttacaggtagaaggaattgtagagggttttacgcaaatgcaaagtgatttggaatctgaaaaaagagccatgcagcgtatttggaaacaacgcgaaaagcaaattgaaaaagtagtgcacaatacgttgggaatgtacggctcgattcgtggtattgccggaaatgcggttcagactgtacgagctttagaacttgattttattgaagacgaagaagaaccgaaaacaaaagaactggaataataccgattgtatatacaatataatccaattgcattgtgctgttttcctattacatcggcattctatcagaaaaaatcggactgaaatagaagtaaaatcgatataattacacagcctgtgtattttttacccttttcggatattatataaaaacaatttgccattccaatcagcgaattttcctgaacaatactgtttatatcagcattaatctttggaaatttatcgcaatcggaatggcaaatttaatttttatttataaaacagaatttagtctacttttctaaaaaccaataatttcccatcaggattagaaagtgtcaatcgtaaattttcaattgaataagtagttgttttttgcaatgtttctacaaattcaccttctttattcgccggcatacaagccatcaaagtcgaaattacatcagagaatctcaacaatcctttttcgaagaaaatttttcctccaatattattacagcctccaaatcctgaaaatctattttcggctgagtaaatttcaatacgtggcatttctttttgaaagtcagaagaagtcaattttcttccattcaactcctctaatacccagatatcgtgcaagcgataatccgtaatatactgaccacaaccgtttaatgttttaccattcatttctactttaaccgtgtaaggcgaaacggcacctgacattgaatccgtacattcgaattgctgaacagtaatagtagcctctgtttttccgctttttactctatacatttttacattagcatccattgcctttattggttcaacggcatcaaaactaatggactccattccttctatcaatgatgtaaaaacaattttatcttttccaaatttcaatccccaaaatggttcatttccagtagctttaaaataaacatttagatcttcttcttctgaagtggtttgagaagtggtttctttcgtgtttgtttttttaactgcaaccgacttacaacttaagatcacagacattagggcgcatagtaaaagtacttttttcatatcattaaattttttattatgacttcacactagaaaaaaccgagccaaaaatcaatactgcccgttttttatgatttttttaagcagaacccagtattaaaattaagacaaataatacaattactaaaataaacttaaaaactaaaaatactgccaaacactacccctttataatgcgaagtaaaacaaatacacctctcgcattgtcgaaaaaatttaccaaacaactaatttctgtatctttgaactctattattttactaaaaaaatgaatacaccttttcaaaaagccggccagttgattgatgctgagaacgctcaggatcctaatatcgaaatcgatcaaaatagagagtatccaaaagaattattgtattctgatcgaatgtataaacgattgatgcagtttaaacctgaagcttcagaagctgttcaaattgcctcaaaagcacaacacatctgccgatggaaagtggcacgcgaatcgtatccaatggatcgtgtcggatatttgaaatggcgggaagaacttaaaaaatttcacgcaaaaaccacagccgcaattctggaaaaagcaggctataattctgaatttatcgatcgggtttcctttttaattgaaaagaagcttctaaaaaaagatgccgaaacacaactgttggaagatgtaatttgtttggttttcttagaatattatctggatccgtttgtacacaaacacgatgaagagaaactcaaaaacatcattaagaagacctgggataaaatgtctgacaaaggacatcaggaagccttgaagattagttatactgaagaaaacttaaatctgataaaagcctctttaggtctttaacttcattttaaattaaggtaaattcctttcggtatcttctgcataattcttcattcctattacgtatatttgcttagtcaatttagaccaatatacgtagggtcttgaagtaacaattaaataaataatgagtaaaacgattcgggtagtcctcgcggataatcatgtttttgtaagggacggaataaaatctttgttggaaaacgaagtaaacatagaagttgtaggcgaagctacagatgggatcgatacgctcgaagctgttgcagcaagtgagccagacttacttatactagacatacgcatgccgcatttaaccggtattgaagtagtagaaaaacttagaagtgaaaataataaggttaagattattatacttaccacacatgaatctgaagaatatgtactaggtgcattgaaagcaggtgccgaaggatatttactaaaagattccagcaaagaagaatttttaaaagccttacataccgttttaaacggaggaaaatattacagcggtgatgtttccggaattttgattcatcactttgtgcattgtactgtttcattagggcgtaaacaagctttagccgaagaaatcacgattaccaagagagaaaaagaaattctgtctcttttattatccggaaaaggaaataaggaaattggcgaaacccttaaaatcagtaagcgtactgccgaagttcatcgctttaacttaatgaaaaaactaaaagtaaaaaacctgatggagctttcaaacaaagcaactgagtattctttgctataaaaattacgtacaattacgtaatctatttgctaaaaatcgtgatatgcaatcggccctctttcgaaatgaaagtgggcttttttttgctattcaaacttcccaatcacacctttttaattagtatatttgagagggtcttttccaagacaggaaaatcagcttatgaaaattatagcgtggaattgtaatatggcattcagaaaaaaagcagcattccttgacgcttacaatgctgatattgttgtcatttcggaatgtgaaaatcctgaaaatctaaagttcagtcccggaacaaaattaccaaacgacatgctttggtacggaaccaatccgcacaaaggacttggtgttttttcctatagtaattacaggtttgaattgttagactgtcataatccattgttcaaaaacattttacccatagcggtaaccggcggagatattgattttactttgtttgccatttgggccaataatcctcaggacaaagacggacaatatgtaactcaggtatggaaagcgattcattattatgaagatctgatcaccgaaaatagaaccattttaatgggagatttcaacagcaacacgatttgggataaaccccgaagagaagccaatcatacctccgttgtagataaactgggcaaacaacaaatttttagtacctatcacaaatacttcaatcaaatacaaggtaaagaagagcatcctactttatatctttaccggcatgaaaacaaaccctaccaccttgactactgctttgcctcacaagatttcatgaaagttttagaaagtgtggaagtgggcacttatcgcgattggatgatgtacagcgatcatattcctttaatcattaatttcaatatataaatcatgaccaacacctggaccgaacggtggaacgaccgttacagcgccgaagaatttgcttacggcaccgcacccaacaattatttaaaagagtcattagaaaaacaagaccccggaacaattctttttcccgctgagggagaaggtcgaaatgccgtttatgcagctaaactgggctggacagtttcagcatttgatattagttcggaaggcaaaaacaaagcccttaaacttgccgaatccgaaaatgtcattctggattatcaggttggagaactcgaaaccttagaatatcagccggggcaattcgatgctattgctttaatttatgcacactttcccgcagaaattaaatcgtcaattcataaaacacttgatcaatacctgcgcaaaggcggctgtatcatttttgaagctttcagtaaaaaacatttagactatctcgccataaatgataaagttggcggaccaaaagatattgcttctctgttttcaatggaagaaatccaatctgattttcccaattatgagatcgtcacactggaagaaaaagaaattgaactcaatgagggcctttttcataacggaaaaggttccgtaatccgatttatcggaaagaaaaagtaattcgttatacaaacatttgtagagacgctgcaatgcgtctctacaccacacctctccaccctcaaccaaatgtgttctgccctctccgatcacaactgaaaaatatctaaaacaatattccgaataagaagctgtttccagctgttcgttgtatcttttgtcccgaaccccggtacaaaaggatgtcactaccatctgggctagtgagctcagtgtacagtttacagtttacagtacacagtttgcatttcacaattagcaattaacaattaacaatcaactcctcccattttccatgtagaattgttaaggaattttgacatacaattttgacaacccatacaaacaattcactttcaaatacttaatatcaaaatttatccgaaaacttaacattacaagacttgttttatcattatctttacttaactataaattaaccatttgattacattgccagtaattaaccttatctaaaagcgtattaaatatggaaaacaaaaccgaagaaacgaatcctgagaagatcgattcaccaaaaactgaaaccattcaacctgttactgataatgtaaaacctgttaccgctcctgttaaaaaagcacccgttcgtaaagcaccagctaccagaacaacagcagcaaagccagcagcaactaaaccggcaacggtaaaagctccggcggcttctgttgcaaaagctgcaacgacgaccacagcaaaaggccctgccaaagcggttataaaaccggcagcagtgactacacctaaaccagccgtacagaaaacaccagcaaaaaccgcagctgcaccagctgttaagccagtagaaaaatcggctactgaaacagctgtttctaaaccaaaagaagaaaatactaaccaggcggttaaaatcgaagataaagctgctaaaaaagccaaaaaagtgaaagacaaagaaaaagaaaaagccaaaaagaaactggctaagaaaaaagagaaagctaaaaaagataaacagaaagaaaaagctaaaaaggcaaaactaaaagctgcagccaagaaaaaagaaaaagcaaaaaaagcaaaggaaaaggctaaagccaaaaaaattgcaaaaaagaaagcaaaggctaaaaaaaaggcaaaagctaaaaagaaaaaataatactaaaaaaggtttgactttataaaagttgaacctttttttatatagctaaggagtgaataaaaaggttgaaaaaccaatagtataaatattgtgcagcgcactataatctaagttaagagagaatattgccctgaaaaagcaagaacaacttttacattgtgtttaggcttttgccctttcagggcctaaaacatcttttcaccattcatacatagcgcttcgcgccatgctacggctaaggctctttcaaagcaactttttatcttgatcttacctaactctcgtcacccttacaagtttaaattctgaaaaataaattcatcgtcaaaatgttcctgaaaataggagatccagtctgaagtgtttcttactacttcaccaattacaataatagcaggtgatgtcatacttttttcggaagccaattttacaatggtatcaatcgttccgactactttctgttccgattcttttgtaccgttttggataatggcaataggcagattgtctttcctattctcctgataaatcgatatgatttcagttagtttatgcattcccatcaaaataattacggtcgccgccgattgagaagccaaatgaatatccttagataatttatgatcagaagtcgttcctgtaatgacccaaaaactttcagctaccttacgctgcgttatgctaattccagccgaagccggaactcctaaagcagatgagattccgggaacaatgtctgtttcaattccaaactgttctgcaaattcaatttcttcacttcctcttccaaaaacaaacggatcacctccttttaagcgaaccacatgtccgtaacgtcttgccatcgaaacaatcaattcgttaatctgatcctgtgtgtaagcatgacagcccaatcgttttccaacaaaaataatttcggcatttgaggcgtatgttaataattcttcattgactaatgcatcatacaaaacgactttggcgctttttaaaacttttatcgctttaatggtaatcagttcggcatcacccggtcctgctccaacaatcgttaactttggtattttcaaactttgcataacggtttaacttagattgacattcaaatcgtctaattcgtcagccgaattaattctgcttaggtgaaaaacttcactttcttccagattaataatctggtgtggtattctttccagcaaatccatcacttttaattcattaccatcaatggcttttttaataaaaggaatcattattctggaataaattcctattagcggatgcatgcggctttctgaagcaaaaactgtaattccggcttcttctgtatgtttagaaagaagttcctgcaataattctgttgaaattaacggaatatcacaactcaaaatcagattaaattcggtttcagattgtagtaaggctgtataaattcctcctagcggacctttatctgcaataacatccggtatttttggataagtgagataatcatattctttagattctgtgattaatacaatcttttgagttacgggtaaaatggctccgataatgtgctctataaacggctttttccgaaacaaaaccaatcctttctccgactgcagctgagaactttttcctccacaaagaataaatgctgtaagtgtttccatgattttattattttgtttcaggtttcaagtttaaagtttaaagtttcaggtttcaggtttcaggtttaaagtttcaggtttaaagtttcaggtttcaggtttcaagtttcaggtttcaagtttcaggtttcaagtttcaggtttcaagtttcaggtttcaagtttgctcctagtctaatcactaagatcgaaaactcataactcataactcataactaataactacctcttctttcaccctataaatttagcttaattctttggaatagtccttcaaaaatcaatttggtttgatgattagcacttaaaatgaactgatttacttctaaattttaaagattttgactggttcgaaatggtctctcttattaatctattatgaaacttcttagaccaaaaaacactttatcagacgtttttgcattattttaaaattaggtaagccattaaaaactagaaaactaagtataaagtactacattttttaacataaaaaaagacaagctattatttttaaacttcttcaaacaaaacaattaaaccactcacagtcagtatgttaaaaacatgtaaatcatacaaaaaactccctggtttgtactttctcaaaaaaaaaataaacaaatttttggtttttattatattaaaattaactttgtctataggattagtagagtttaaagtaatatttgaaaccaaaaaaatcatattttgaaaacaaccgaaaacagatcgtattacattcttcctaaaaaatatacatataacactttttgttatatgtgcatctgttgctaaacctctgccctttttttcgtttgccttcgatttctcttttacatcgaatcgtttaaaaaacgaatttttaaatatacacaagattccatattgaaatttcaaagtcggtttgacacatttgtttgtgtcaaaatgagcactgaaactatacctatatcttaaaaaaaatgactaaccattaaaaaaaaacaaaatgaaaaacatgcacagctgttgctgtaaataaaaaaagccatttctgcggcaacagaaatggcaaggcttaaagaatatttatcactaaaccaagaatatgatcagagagttgaaaattcaactttcagggcttcttgttcattaattaaaccagtacaaagaaatgaaaaaaaaattaaaaatatactcattcttatttctcctgctcctatcggcgggaattaatgcccaaaacacaacacctcttattcaatcgaaactcgacggaacggttgtagatgatatcaccaaccaacccattattggcgcttcggtagtaattaaaggaactacacacggcgttcagacggatgccgaagggaaattttattttcaaaccggacagaaattcccttacaccttaattataacctacatcggatacaaaaaatcagagattatagtcgaaaaaaatccgatcacgattcatttaaaagaagaacgtcaggagctggatgaactggtagttgttgggtacggatctcaaaaaagaaaagacattacaggttcagtcgcttcagttccaaaagccaatttaagtcaggtgacctcatcggcagataacttacttcgaggggctataccgggagtggtagttacacaaagttcgggtcgtcccggtgcttcatccagtgttcggattagaggaggaaactcaattacagccggtaacgaaccgctttatgtggtggatggaattttaatttataacgacaataacaacagtacggccggagttgccaatgcaggagctactgtcaatgtactttcgacgattaatccgggtgatatcgaatctattgaagtactaaaagatgcatctgcaacggctatttatggatcacgcggggcaaacggcgtggtgattatcactactaaaaagggaacaaaaggtcaggataacatttcctatcagggctatattggattccaaaatgtgtcgaaaaagctgaacttaatgaatgccagccaatgggcaagcttacgcaatgatgttcaggccagtattggtcaggcgccttctttttctgctgcccagatcgaagctttaaaaacttcaggaggatacgactggcaatcggcggtttttagaactgcggcaccgattcaaaatcatcaattgtccttttcaggaggtgatgatcgttcaaggtatgccatttcagcggggtattttcaacaggacggaattgtaattgcctccgattttaaacgtatttcgttacgtgtcaactacgaaagaaactattctcctaattttaaatttggtgtgaatgccaactacagcaattcggttgccaatggtattggtaccaatggcggttcttctgccggaagacagcctaatccgttagtggttgctttgtatcagccacccgtagttccgatcaaaaatcctgacggaagctataatctgaccaataatccctatgcaacggctgttaacgggataattgccaatccgataaatgatctggtgagcaccaccaatgaaactaaaatcaaccgaattctgaccagtttattcggtgaatataaaatcaccaaaaaactgactgcaaaagttgctgtcagcggtgatgtcatcaataccaaacaaaattactatgctccggcaaccaccgctaccggtgccggaacgaaaggctttggttctgttggagaccgattggtgagctctgtactgaatgaaaacactttgaactataacactaattttggcgataatcataaattttcagccttaggcgggtatacgcttcagtacacgcaaggggaagtggttaatgcaggagctcaattctttgtaaacgatgccaatacttacaatgctttgcaagacggagttccggtaaaaccctctacggatgctttcgaaagtgtcttaaaatcctggctgaccagggtgaattattcgtataaaggaaaatacaactttacgctttccggccgcgcagacggatcttcaagatttggttcaaaatcgctttggggttatttcccttcagcaggattttcctggaatatcacagaggaatctttcgccaataatatcaagggtttaacggaaactaaactaagaataacagccggaactaccggtaatcaggaaattggaaattacctttctctggctcagatggggtctgtaaattatgcttacggaggaacactgcaaaccggtttagctcctacccgactggccaattcagatttgaaatgggagaaaacaaatcaatataatgtaggattagatttgtctttattagaccgcaaaatcaattttgtttttgatgtatattacaaaaaaacaaacgatttactaatcaatgtacctgttccgctgatttcaggatatgcaactgtattacaaaacattggcggtgttgaaaataaaggtatcgagattggtctgatcacggaaaatctaaaaacagaacacttttcatggaattctaactttgttttctctgccaataaaaacaaagtagtggctatcggaaacggagtcgatcaattttttcctgtagtaccaaacggatctttattacagcagcaacccgtaaccgtaaaagtaggattgccactgggaactttctggggatacaaaaccaatggcattttccaaacgcaggaagaagtcaacactcagcctaaaataaacagtttagccaatacaaaaattggagaccgaagatatgtagatactaacggagatggtgtaattacagctttggacaaaggaaatcttggaagttcacaaccaaaatttgtcggaagttttagcaacaccatttcttatcatgactttgatcttaatttttcttttcagggatcttatggcggtaaagtattcaatgctttaaatcagcaattggaaatttcgaccctgggtaccaatgcgaatgtaactttagaagaccgctggacaccagcaaatccgagcaacgaagttccaagagccaccagttctccattggggattgtttcagaacgttatatagaagatgcttctttcttaagattaaaactaatcaccttaggctatactttaccgaaaagcctttccaaaagactgggtgctaagagcgttaaattttatgtctctgccgaaaacttaattacatggaccaaatacaccggatacgatcctgaagtaagctcctacgaacaaaacaacttatacccgggaattgattttggcgcttatcccaattcaaaaacattcatctcaggcctgaacgtaactttttaagtaaaaaaatacaaaatgaaaaagatttttataacattcctattgagtgccggactattggtatcgtgcaccgatttagaggtcacccctacctcatttgtaaccgaagacaactactttaaaactcaggacgatgccattgctagtgtgactgctgtttatgcttcattgagccttgatccgggagaacagagtttatttggccgaaatttatatttcctgaccgacatggcatctgattatgccgcagcgggagtttcggcaaccaatccgcaggtgagagctttaagcagcctgactcatgatgccacttctgatcgtgttcaggtggcgtggcgtcaaatctacgccggaataaacagagccaatgttgctatcgataatataccaaaagtagccggttcagacgctgttaaaaacagattgattctcgaggctaaattcatccggggtttattgtattttcaggcagtacgcctttggggcggagttccaatcgtattgcatgagcctacttctattcaattggaaagtttaaaatcgaaaagagccactgtagcggaagtatatacccaaattatttcagatttaaaagatgctgaagcattaccatccacttatcctgcaacagatgccggacgtgctacagcgggagcagcaaaagccattctgaccaaagtttatctcacaagaaaagactatccgaatgctattttaaaagccagagaagtcatcaatggcggttatggatatgcgctttttgaaaatttccaggatatttttaccaaaaccaaaaagaacgggaaagaacacattttctccgttcagtttgaacccaaccaagctggaaacggctccagcggaagtacttttcaggccacttcttttaccggatttacggctacagaacctgccgatattatttcggatgttgctttgttttatgatatttatgctgccggcgataccagaagagatgtaagttatgccaaacaattaccaattcctggtaccgcaaacgtatatacttttccgaaaccgatcttcaaaaagtatctggatttaacgaatctggccactccgtctaacgtctcaatcaattttccgataattcgttatgccgacattttattgtctttagcggaagccataaacgaacagggagcaccaacgcccgaggcctacgagttaatcaatcaggtaagaagaagggctttcgggaaaccaattaacacaccagatgttacggtggacttaaccggattaacacaaacgtctttcagggctgccctacaggaagagcgcaaaaaagaatttgttcaggaaggacaacgctggtttgatttggttcgctggggaactttggttaccgaagtcaaaaaagtactggccaaaaattctgtttccgaacgaaataatttatacccgattccacaaagcgaaagaaacatcgatccaatcggattaccacaaaaccccggatattaattaacataaccctaaaaactaatagattatgaaaaaatttaaacccaatagtaaaattaaaagtccgcaaaaagggcttttatttactgccttgcttgcagcacaatttaattttgcgcaaaacaatcccaatgctgattttaaaggcgttataggtaaaactttagccgattcgaaagaatattggcctgagcctgtaaaagcaccaacgggtgccccaaatattgtctggatcttgctggatgatgttggatttggtgcctctagtgcttttggaggccttattcaaacgcccacttttgacaatctggcgaataatggtttacgctacacgaattttcacactacagccatttgtgctcctacccgttcagctattttaacgggaagaaattcggggaaagtacacgtaagcggattctctcacaccgttttatcggctggtttccctggttgggacggaagaattccatctgataaaggtacgattgccgaaatcctgagagacaaaggatacaatacttttgccgtaggaaaatacggtttgactcctgatgaagaagcaactgattccggaccatttgacagatggcctaccggaaaaggcttcgaacacttctacggtttcttagggtcacaaaccgatcagtacaaaccggatttggtggaagacaatgcacacgttactcctgacggaagacatttaaccgaccagattacagacaaagccattagctatatcaccaaacagcacaaggctgcaccagacaaacctttctttttgtactatgcacctggcgctgttcacgcacctcatcaggtggcagaatcctggagcgaaccttacaaaggaaaatttgatgaaggctgggatgcttatcgcgaaaaagtactggccaaccagaaaaaattaggcgtagttcctgctaacgctgtattgccggagcgtaacccgttgattaccgactggaaaaaactaacacccgatcaaaagaaagtgtacgcccgattcatggaagtctatgccggatatcttacctataccgatcatgaaattggacgtatcgtcgagcatttaaaacaaaccaatcaactcgataatactttaatttttgtggcaattggcgacaatggtgccagtaaagaaggtactacacaaggaaccatcaaccaaagtctgtttgctcagggcggatctgatgaagaaaaccttcagaaaaacttaaacaacattggtgaaatcggaacggcaaaaggactcaataccaattatccgctgggatgggctcaggccaccaatgttccgtttaaaaactggaaacaagatgcacaatcggaagggggaacacgtaacccattgatcgttttttatccgaaaggaattaaagacaaaggcggaatcagaaatcaatacagccacgtaaccgatctgctgccgacaactttagacattgccggaattaaagctccggaatatatcagagaaataaaacaagatgctattcagggatctaccttttatgcttcgctaaacgatgccaaagcaccttctttgcataccgttcagtactactatattttcggaaacagagccatctacaaagatggctggaaagcgggagcagctcacctgccggactcttttgcggtaaaaaaatcattgggtaaaaacgaaaaaccggccgaaagtaattttgacgcagacgtatgggaattgtacaacctgaacgaagatttcaacgaacgtaacgatctggctaaaaaatatcctgaaaaattagccgagcttaaaaaactgtttgatgaacaagccaaagaaaacaatgtttatccattgattgactggcaggatgtgtacaacagaagaatacacaacaccacagccgacaaaggaaaaacattacaggatctcatccaacaggcgaccagacccgcaaattcaaaataattaacccaataaagattcaggtcttttgtcaatgtattaaagacctgaatccctttcaattccaatccacatgaaaaaaacagattatgaaattataggaaaaaaaatactcgtgggtgcgattgtttttttagttccgctactcattctggcgggaggtttaactttaattagcaactttttaaaataaaaatcatggcagcaacagcttataattcaaaaagtaaactaaccagagatctaagtattagtctcttcctttatgcactgcctgttctggcaatctttctgtatttcaaattaacaaatggtgtgatcgcacaatcacatattgccttaccatcctttttagaatttatcaaaccggctttcgaaaacatcagaacctggggattaaccgcttttatggtgattctgggtattatcgaatttacagcaggtttatacgacgatcaatggacgggtcaggaacgcaaagtagatatcatttgttttctggctcctaaattgcttttgcctccggtaattgcttttttcagtcttactgcattgccgtatttaattcccaatctcgccaactcgctttcgtgggttccgttttggggaggttttttccttatcgcagtagccgatgatttaacgcagtattggtaccatcgcttacaccatcaggttccttttttatggcgttttcaccgcacacaccactccgctccgtacatgggtatggccatggcttccagacaaaactttatttatacaattttcttttcgcagatttacttaacggcaactttaacttttttaggtttaggattacctgcattgtttgtattagtgatcaaaagttttatcactttaggcgctcactccagtattgcttgggacaaacccttttacaaatacaaagttttacatccgattgcgtgggttctggaacgtttaatttcgactcctgcaactcatcacgcacatcatgcggataccagcggtgatggtgtaggacattttaaaggcaactttggtaatatgttctttatttgggatatcattttcggaacaggtttaatcaccagaaaatttccaaaatcgtacggaatgaagtcctacaaacaagaagaatggtacgcacagtttctttggcctatcttcaaatccaaaaaagaaggaagtgctttggctgagggggtattagcagttccaatacgccaaaaagtagaaaaaaaagtaccccatccggcttactacgagcaggttcaatcttgaaaatcatgataaaaaataaaacaatccaaaacagtatcgctattgtgatactgtttttatccggaattagttttgcacagcaaaaagcatccaacaccgtctcattagatgttttttacgctaaaattcaaagcgaaaaaaaaccgcagatcattgatgcacgcggtcctgaagaatttgctcttaatcatatcaacggagcacaaaattttaatttggaatcgaaagactatgccaaacgtattgctgccttagataaaacaagaccggtttttacctactcaattggtgcaggcagaagtgtctggctcgcagatgaattacttaaaaacggtttcaaagaagcttatagtttagaaggcggaattgccaactggattggaaacgaaaaacccttttatgccaattcaaaaagcaaactaaccttagccgaatacaataaaatcattacagaaaataatgatgttctcgttgatattggttctgtttactgcggtgcctgcaaaaaagtaaaacctgttttagaaaccatcagagcacaatacggaagcaatttaaaaatcgtggaaatcgatttgggagacagccctcaggtaatcgccgacttgaaaacggtaaaagttttccctactttgattttatataaaaaaggcaaaattgttttcaaaaaagaaggcctcagagatttaaaaaatgatgtcgatgtcgctttggcttccaaataaaaaccactaaataatcgcatacaaacccgacatatttttgaaacctgtcgggtttcatccagtaaaaaaaaccttaaaaatgtcaactcaaaccaaacaatttacccttcacgaagactggactgtcgtagttcttggttttatcatcatcggaatttctctttttctatttcttcctgaaatccctgttttcaaatggtcaacgggatcagatttagtagtggatgtacttaatttcagaaaccttaaaatcctcggattgcaatttatttatctggtttccgtgggaaccttagggacttttttgattggaaaatcagtcaaaaactttttactgggttttccaattgtttatctcttaaccatttttgccttggtgatctccggaaataccaccatcaaaggtctaaatctcgaagcggtgatttttagtttaatcataggtctctgtttaggtaattttttcatccttccacggtggtttcgttcctcactttcgacagaggtatttgtcaaaattggcttggtattactgggaaccactgttattttctcagacattctaaaagccggctcattagggcttattcaggcattagtagttgtactgtccgtttggtactttgccttctggctgtgcaaaaaattaaaagtcgacgatgaattaaccatgatgatttccagcgcggtttcgatttgcggagtttcggcggcaattgcgacttcaggtgccatcaaaggcgactcaaaaaaactgtcttacgtgatttctattgttttggtcaccgcaatacccatgatgattttcatgcctataatagccaaacatttcaactttcccgaagaagtaaccggagcctggctgggcggcagtattgatacttcgggagccgttgtggcatcaggctccttggtaggcgaaactgctttaaaaattagtacaattgtcaaattctctcaaaatgtactcttaggattagctgcgtttgccatatccgtatactggacttatactcagaaccaatcggaagaagctgtggcagccaaaccaactttagctgttatatgggaacgttttccaaaatttgtcattggatttattgccgcttcactcttcttttccttttttttgactgccgaagtgagagacgaagtaaaagacagcttaaaaaatctacaaggcatttggtttgccctggcctttaccagtattggactggaaaccaaatttaaagatttactgggtaataccagccgaaaacctttatatgcctttttaatagcacaattgttcaatatcgttgtcacgctgatcattgcttttttactttttaaagaataacaatctgaatcattttttgaacactttaaaacgtaactaattgtactaaaacacatttcattaaaaataaatcacagagttgttctaaaaaatcataatttactctactttttttaagctatgtttccaggccacaaaccaattcaataaaagataaacccgtttcagcaactcacaacatgaattaaaatgaaaaaaacacttctcactctccacctcttattttcgacagtgcttttcgttttcgcacaaaacaaaaccactacccctacttcaaaaccaaatatcatcctgattctggtcgacgatatgggctattctgatttaggtaattatggttccgaaattaaaacaccaaatctcgacaaactggctagtgaaggtttacgtcttcgcgaattctacaacaactcgatttgcgcaccaaccagagcctctttattaacgggacaatatcaacacaaggcggggatgggattttttgacatcaaccttggcctgccggcttatcagggatacctcaacaaagaatctttgacattgggagaagtttttcgttctggtggttacagtaccttactttcaggaaaatggcacgtgggttccgaagatcagtcgcaatggcctaaccagagaggttttgataaattttatggcatcttaaaaggagcttccagttatttcgacagcaaacctttgccttttggaaaaacaccttatccggtaaaattacttcgaaacaatgaagaactccatcctaaagacgattcttattattttaccgatgaaatcggaaacaacgcagtgacttttctcgacgaacaaaacaaagaaaataagccgttctttctgtatttagcttttaccgctccacattggccgctacaggcaaaaccggtagacattgccaaatacaaaggaaaatttgacgaaggctgggatgttttaagagaaaaaagaatcgaaaagctaaaaacaaatggcattttatcccccaatcaaactgtatcaccaagagatccggaagtgccggaatggaataaacttacttatgacgaaaaacaattctggaaagccaaaatggaagtttatgccgcaatggtagacaatatggatcagaatgtgggtaaggttttgaataaactaaaagcgctaaaaaaagataaaaacaccctcattatctttatctcagacaatggtgcgcagggcggtttcaacacctacaatccgttaggcagaggtttagtccgaaatgatggtccaattggaacttcaggttcattcgattatcaggaacaaaactgggcctatttatcgaatactcctttacaacaatacaaaaacaatatgcacgaaggcggtttcagctctccatttattgcctggtttccgtccaaaataaaaggaggccgcatcgataaaggtaccggacacattattgaccttgctcctactttctatgaattgaccggaattgaatatccaaaagaatacaatggtgccaaatcgaacccgttaccaggaaaaagtctccttcctgtattatttgacaatgcttccgaagtcgatagaggagctccgttattttgggaaagagccggaaacagagccgtacgagatggaaaatggaaactggtatcgatttacccctcttacgagtgggaactctatgatatcgaaacagatcgtggtgaaactaataatgtagccaaacagaaccccggtattgtgaataaactatcggctgcctattttgattgggccgatcagaccggagttgtagaatacagtaaattcaaactaaaacaagaagtgatgccaggcggcgctgccttaaaaaaataattgaaacttctttttacattttataaagcattttaaagacagaaaaataagtaataacaactcttacttctttttctgtcttttttttatccccaaaaaaaaaaaaaaacaactaattaaaaatcaatgccttacctattttatttcacttatctgaataaattttaaaaaaactcttggattttactattttaaatttaactttgtctatagaattagtagagattaaaatttaaagaactacattttgaacacaacagcaagccaatccaattacattcttccaaaaaaatatacctataacactttttgttatatgtgcttctgccgttaattctcaaaaatcttttcatttgaaatcgattttatacctaaaatcgaaattcaccccgagtacaactacacaatcattttattgttggtccttaaaccgggttatactatcaagcaaagatgtctttcgtctgaagaacaattcgatctactttgataaaccttaggattcaacaatttagacattattatactgtaaattaaacggtttttatttcgggggtttttagttttaaactaaatttactagtacgataaaattgtttttttacgaatgaaagttcttaaaatacgacagcaaaaaataaattaaccattaaaccattaagccatggctgaaacaaaacaacaacaaacagcattaggagatgttgcagcaagacaattagcaattgcaacccgtaccgttcctcaaattggaacaattacaccacgttggttaacgcatcttttgcattggacaccagtagaatcgggtgtattccgtttgaataaagtaaaagacggaagtcacatcgaagtagattgttctgcaagagacgaaagagttttacccaatacttttgtcgattatatcgataatccgagagaatataatctggcagcagttcaaacgattgttgaagtacataccagagtttcagatttgtacagtaaaccgtacaatcagatttctgaacaacttagattggcgattgaaaccattaaagagcgccaggaaagcgaattaatcaacaataaagattatggtttgctcagcaatgttgcgccttcgcaaattattaaaaccagaaccggtgcaccaacgccagatgatttagacgaactactaacaaaagtgtggaaagaaccgggattctttttactacatcctttggcaattgcagcttttggccgtgaatgtacccgtcgtggtgttccacctcctacgacctctttgtttggatctcaatttttaacctggagaggaattccgcttattccatccgacaaattgcctatcaaagacggaaaatcaaaaatcattttattgcgtacaggagagagccgtcagggtgttatcggattaattcagccaggattgcaaggcgaacagtcaccgggattatctgttcgttttatgggaataaatgaaaaagcaattgcatcttatctggtatcactatattgctcactggcagtattggtagacgatgccatcgccgttcttgaagatgtagaaattggaaagtaccatgagtataaatactaacaacaacggcttacccaacattgaggatttgcagcttttggctaacgaattgttcagtacgttacctaacgaatttcccaaagaaatttcgttaagtcctgatcgtagcgaacatccccgtgccacaaaagttgcagaaaccttcctgaatacggggaacttcagtggccacagcccggcagccctgcccttgcaggatgcaccagcttcaccaactgctttaccagcatttagtggatttggagcaacgccaactgttgctaattatggctcaggagcttcggctttatatccaaatgccggagccggatttgatcctcaaagtgaaacttctccattgggaatttcacacggaaataatgtaaatgtcaacaatccgcaaaccggtttttatgacgaaaattttgggaataacggaaccgctcagctaaatgaagaaagtattttttcgaaattgcttttaaataatgaatacctgccttttcaaaaccaaggttcttcgtttgaaacagaattaaaagcagcattggcttttgtggatacacaatttacaaaacgtgccaatcttccgttaaacggaaatgagatgtcaaattcgtactactttttagagcaaaatccgtttgcttttgatcagagaaattcgaatttaatcgttggaaatacttttgaaaaacaagattttggtggtatttccggttctcattttgatgctaaacgaatcaaaaaagattttcctatcctaagagaaaccgtaaacggaaaacctttggtttggtttgataatgctgctacgacgcaaaaaccgcagtcggttattgatcgtattgcctatttctacgaacatgaaaattcgaatatccatcgtgctgctcacgaattggctgcccgcgcatcggatgcttatgaagctgcccgcgaaaaagtaaaaacgttcctcaatgccggctccgtaaacgaaattgtatttgttcgtggtgctactgaaggtattaaccttgtggcacagagttggggcgattctaatttagttgctggtgacgaaatcattgtcagtaatttagaacatcacgcgaatattgttccgtggaaacgtctggcagataaaaaaggattaaaacttcgtgtaattccggttgacgatgatggtcaacttttactggatgaatatgctaaattgctgaattcaaaaacacgtctggttgcttttactcaggtatcaaatgcactgggaactgtaaccccggccaaaaagattgtcgaaatggctcatgccgttggagcaaaagttctaattgatggcgcacaatcggtttcacacatgaaagttgatgttcaaaatttaaatccggactggctggttttctccggacacaaactttttggacctacaggaattggcgctttatacggaaaggaagaattactgaatgaaatgcatccttaccaatctggtggcaacatgattcaggatgtcacttttgaggaaataaaataccacaaagcacccaatcgcttcgaagccggaacgggaaatattgccgatgcaattggccttggggcagcaatagattatgtgacaaaattaggaatagatgcaataggccagtacgaacatcaattgttagactacgcgacaaaactgctaaaagaaattccgggcgttcgactgattggtacagcagcaaataaggcaagcgtactttcttttaatctgcaaggttacacaaacgatcaggtgggacaagccttaaataaagaaggtgttgcagtacgaaccggacatcattgtgcccagcctattttgcgaagaatgggagtcgaaactactgttcgtccgtctctggctttttacaataccactgaagatgttgatacttttatcaaaaccttgtgggaacttaaaaaagttagattttaaaaaacaatgctaaaaactaataagttagacctattcaaaaagaataattactttttttaatattttgagtaattataaccgacctcgactggattcaaaccagtaaccttctgagccgtaatcagatgcgctattcagttgcgccacgaggcctttttgttttttcaattggactactttttagcagctttgttgattgcttattgccgatgcaaaaataagcatatgtctatttcttcaataaggaattaaagagaaaaaaaaagacaaaagatatttttatcctttgcctatatttgtgacctcgactggattcaaaccagtaaccttctgagccgtaatcagatgcgctattcagttgcgccacgaggccttttgtttttcaattcagctatttttcagtagctttgttgattgcttattgcgggtgcaaagataggcataaatgtgagatatgcaagtatgaaataacataaaaatgaaaaaaaatgcagattgaaaaatatatacgtgatattcaaggatttccgaaaaaagaaattttgttcaaagacatcacaccactgctcaatgaccctattgcgagaaaagaaaccgtttttattttggctgaatctttaaaagggctcaaaatcgataaagtggtgggagccgaaagccggggctttttctttgggatattactggctcaggaattgaatgcaggctttgttccggtaaggaagccaaataagctgccttacgacacgatttcggcttcgtacgaactcgaatacggcacagacagtttagagatgcacacagacgccataaagaaaggagacagggtgttgattcacgatgatgttttggccacaggaggaactgcaaaagccgtttgtgaattggtagaacaactaggaggagagatcgtacaatgcaatttcctaatggagctaagttttttgaacggaagagagaaaattagcaactatcctgtatttgctgcgatcacctattaagtagattttagaatgaagattaacgattttttgatttctgatttgatagggctaaatggtgaggttgctgattatatatggtctctaaaatctgaaatctaaaatctgaaatcagaaatcgttaatcaaaaattgttaatcaaaaatcgttgattctccttgacgtaaagaaattgtataatagttaattagatttcagaatgaagattaacgttttttgatttcagatttgatagtactgaatggtaaggttgttgattgtatatggtctatgagatctgaaatcatcaatcgttaatcaaaaatcctatatccaatatcctctctcaaactagtgaaattgtctaaagagtaaaatttaaaaacagataaaaaaaatcccaattctaaattagattcagaattgggatttatagtatataggaattattctttatctcaaggttgctccaagttcagtttcgaaagtctgctgtaatttcgacatgattttgtcaatttggacgtccgtaagcgttttagtgttgtcctgaatggtaaaactcaaagcgtacgattttttgccttccggaagtttatttccttcataaacatcaaacaggttaatatcttttaaaagagacttctctgcttgtctcgcaaggttgaaaatactttcgtaagtggtacttttatcaatcagtaaagccaaatctcttcgaacttcaggatattttggaatttcagtatacttaatctttccggtaatgatttttagaatcaaatcccagttgaaatcagcaaagtaaacatcttgtttgattccgaaatgtttcaatattggctttttaacaatacctatctctactaatgtctcgctgttgtagcaaattgccgttccttctgcgaaaacatccgattgtaccggagcattggtgattttatcaattcctaaacgtgataatacgcctcttacatatccttttagtaagaagaaatccgttgctttttggggattggtccagctttctttgtttctgtttcctgaaattaacaaagtaagatgtttgtgctcctcatatccgttaagatatttatgatacgttttaccaaattcaaatagttttaaatccgaattctttctgttgatgttatacgaaatagcttctaaacctgaaaacagcaaagactgacgcatcgtcgataaatcactgcttaaagggttcagaatcgtaacattgtgctcctcttttaaagcagaagataattttgcatatgtggctgtggttaatgaattggccatcatttcgtgaaacccttgagagttcagctgagaagcaattacattttgaaccttataatcttctgttcttggagaattagcaactgtcgcattgaattttttagaaaaattaatgttgttgtatccgtaaactctcagaatttcttcgatcacatcaatttcacgctgtacatctacacggtaagcagggatcgttaaacctaaacctgaatctgaaacgctgtttacttttatatctaaagaaaccagaatttttttgatggtatcttttggaatttcttgcccaataattttcgaaacgtggctgaaattcaataaaactgaaaaatcttctacttttttagggtaaacttctatgacatcagaagtgatttttcctccggctacttcctgaattaaaagtgctgcacgttttaaggcatattctgtaatggttgggtcaattcctctttcaaatctaaaagaagcatccgtatttagtccgtgtcttttagcggttttacgcacgctaacagcatcgaaataagcactttctaagaatatagcggtagttccttctgaaactccggattttttacctccaaaaacacccgcaatacaaagtggccctttttcgtcacaaatcattaaatcttctttgtgcaaggttctttctacatcatctaaagtcacaaatttagtgccctcaggaagtgtttttacaattacttttccattgattttcgccgcatcaaaagcgtgtaatggctgtcctaattcgtgtaaaacataattagtaacatcgacaatattatttttaggagtcagtccgattgctttaagacgatcttgtaaccaggctggagattctttaaccgtaattccggagatagttactccgcaatatctcggtgccaaaagaggctcttcaaccgtaacgtcaatttttaaagtacgcatgtctactctgaaattgctcactgatggtgtaattaattcgatatttacaccacgctgcagcattccggctcttaaatcacgggcagtacccaggtgactcatagcatctgcacgatttggagtcaatccaatttcgaaaacttcatcgttgacaactttaaaaacttccgcagcaggagttcccggaactaatccttcagctaaaaccataattccgtcatgacttgttcccagacctaattcatcttcggcacaaatcattccgtgactttctactccacgaatctttccttttttaatggtgaattcagcaccttctttatcgtatagaacggttccaattgtagcaacaggtactttttgtcccgcagccacattagcagctccgcaaacaatttgaataggagcttctaaaccaatatttacagtggtaacttttaatctgtcggcatcaggatgtttttcgcaggtcaatacatgccccacaacaacaccttgtaaaccgcctttgatcgactggtatttttcgacaacttctacttcaagccctaaatccgttagtagctctgaagtttgatcagacggccagtccgttttaataaattgttttaaccaattgtaagatattttcattttgcttttttattcttgtatgaggttacaaatataagaattgcacattgtagtaagaaacaatttatttgcttttttcggactattctttcagagagaaattttagaatatctaagtctctttttaacaccgagaaacataattttacatcttcaaataaggcgtttcacttggagcaaatcgcatagcatatgggagagaattgtatttcttttatatgttctttcagtaaatagaaactattttttttatgtattaatttcttttaaaaagacttactacattgattgtcaggtatttatattgtttgattaaattaactcttcaatgtgttttttaatgttttcggagatcttttttgttggcagatcgttttcatcatcgccaaacgggtcttcgatttcttcggcaataagttctaaacttgccagtacataaaagatgaaaaccacaaccggagctacataatagcctaaacttaccgaataaccaaaaggaagtgtcatggtgtagaagaagataaacttcttgataaaagcgctgtaagagtaggggataggggtgtttttgattcgctcgcaggcaccacaaatgtctgtaaatgattgcaactcttcgtttaaagtaataagctgttctccgctgatttttttatcttcatacagatcgtttattttttgaaaaattattcttttaacctgatttggtttgtgtttgtggtgatcaatttctaaatctacatcttcaaaaagctgctttccggtatcggaatcatgcaggtgtttgtgcaatacggaagcgtaggcaggaataaactttctaaagaattttttatcattttcttctttcagcatgactgaaagtttaatggccagatttcggctattgttaacaagacctccccaaagttttcgaccttcccaccaacgatcgtaggccgtattggttctaaaaaccaataacaatgagattacaaaacccaacatcccatgcatgatcgggatgttgtggatatagtcgtttttgccaattttaaaatacgagacttccaaataccctacaatcgaagaataaattccgatcgcaatcataaccggaagtagttttctaacggtatccgatttatgaaaatgaaaaataaaagtgaaccaatctttggtgttgtatgagatcatttggacttgttttgaaacaaatttactttaaaaattgatattcccggccaattctttcaacgcaatctcagataattttgcctgaaattgtgcattgctgtagcgtactttagcatttacatagtttaattgagccgttctgaaatcaagcgttgtaatagttccaattctgaatttatctaaagtaatatctaaattttgtttggcaatcgttacgttgtcttcttccaatccaatcaattctaaattggttaaatacgtttgaaaagcggtacttaactgagtatcgaggatcatgttttgctgttcaatcgcaatttgtgagttttcgatctgtagttttgctaccttttcatttcggtgttgattgaacccgtcaaaaaggtttaaagtggcattaaaaccatagttaaaacctttagaagagttctgacttgtaaatccaagactggactgactttcgttaaagttgtatcctgaagtcagatttaccaccggataacggtctgcttttacttgtttaagctgaagttccgcaatacgtttgttgataatctgagattctaaagccggattttgcttgtgagccaattctattaaatcaactaaaacgagtttattatccacagcaactacattggttacggtgaaatttattttaggatcacgtgccaaatattggttgagtaagattttagcattggcataggattctttttgtctcaataaagcaacctgatctgaatttaaatcaacctgcgcatttaaaacttccagttttgatgcttttccaatgctgaaacggttttgagccagcgttaatctttggttcgaaattacaattgtggtgtctaatgcagacagttgctgctgttgttgtaccaaatcaaagtaagcgctgttgacctgtccgattttgaccaatatcactcttttcatttcagaatcacccagtttttgcaattctttaagctgatccagtttggcaaacattttcattccgtcaaaaacggtccatcccaaactaacaccgtaggctaaactgttatttttggcatttcgtaaagaggttgtagttccgtcctgacgtgtttgcgaggaattggtaacactgttattatcggttaccgaagccgtggcccttggcagcattccggcgtttccaactgttacattggtttcgtttattttaaggctgtttttggcaatcttaatttcgaaattattctctaaggcgatcttcatggcgtcttcaatggttaagacttcctgcgcactgctttttgttgtacagaacaacaataaaacgagacttgttactattattttagctttcatgtgatgaaggattagctgcgattcgactttttcagaagagattcgcagcttctatatggtttcagattttatatcaattatttcgtgtttctttcatattcatcaatatgatcaaattcaggataatgttttctcgctttggaccacattaaataaatagcaggaatcacaaatagggttagagccaacgaaaagatggtacctccaacaattacaactcccataccaattctactcgtagaggcagcaccaagtgacattgcaattggcaaagctcctaaagcaatcgccaaacttgtcattaaaattggacgcaaacgtgcttctgaggcttctaaaatagcttccagttttggttttccttgttcgcgaagctgattagcaaattctacaatcaaaataccattcttcgtcaccaatccgataagcattaccgttccaatctggctaaagatattccaggtttgattgaagagccataatgagaataacgctccggcaaccgccattggtacggttaagatgatgataagcggatcgataaaactctcaaactgtgcagcaagaattaaaaagatcagcaataaggctaatccgaaggcgaaagaagtgtttgaactactctcaacaaagtctctcgactctccacttaaatcagtggtgaaagtatcgttaagtacttttgctttgattctgtccatttcctgaataccgtcgctgatactttttcccggtgctaaacctgcagaaacggttgccgacatataacggttgttgtggtacaattgaggcggattactttgttcttcaattttaaccacgttgtccatctggatcaattctccgcttttattttttacaaacatagaagtcagatccagcggtttcgaacggtctttttgatcaaactgaccaattacctgatactgttttccgttcttaatgaaatacccaaaacgctgtccacttaaagaaagctgtaacgtttgtgcaatgtcaagaatcgaaattcctaaactctctgctttttcacgatcaatacttacgttgatttcgggtttgttgaattttaaattcacatcggtaaccgagaaaacgtcacttttacccacttcttccataaaaaccgggattttttctctcagtttctcaaaattcggagcctgaatgatatactgaatcggtaatcctccacgacggtttacagcaatggttggctgttgaataacggatgttttagcatccggatatcgtttggtcattttggtcaattgatccgcaatatccttctgagatctttttctctgatccggttcaactaatgaaagtcggataaaacctgagttcgtggccgaagctccaaaacccggtgcagtaataaccagactcacttttttctccggaatagaatcgtctaccaatctcgagatttcctgcataaaacgatcggtgtattcgtaagaggatccttcaggtgtagtcatacgcatggtcacagaactacgatcgtcataaggcgcagtttcttttggcagtatggtaaaaaacaaatagatcaatccaaaacaagcaatcagaatagggaaactaagccatttttttgcgataaaacgattcaaagagtcggcataaccgctgtttagtttctcaaagaaaggctcggttttgacgtagaatttagattttttctgctctccgcctttcatcaaataggcattaagcattggtgttaaagtcagcgatacaaaagccgagattaaaacggcagctccaatgacgaccccaaattccctaaagagtcggcctacaaatccttctaaaaatatgaccggtaaaaatacggctgcaagggttaccgaaatcgagattacggcatagaatatttcattagatcctttaatcgcggcttcaattggcgacatgccttcttcaactttcttgaagatattctcggtcacaacaataccgtcgtcgaccaccagaccggtggctaaaacaatcgcaagcagagtcaatacgttgatcgaaaatccgaaaagccacatgataaaaaacgtcgcaatcaaggaaacaggaatatcaattaatggtctgaatgcaatagcccagtctctgaaaaacaagtaaataataatgattaccagaataatggatatccctaaagtttcggcaacttctaatactgatttttttacaaagattgtattgtccagtgcaatattcagtttgatatcttttggaagatccttctttaaggcttcatactttttgtaaaattcagatgaaatgtccagatagttggctcccggcattggtactatagcaagaccaatcataggtaaaccggattgactcaattttgtttcgatgttttcaggacctaattcagctcctccaatgtcgcttaaacgaacaatcttatctccgttagtacgaatgataatgttgttgaattcttccggttttgaaagattaccaaccgtttttacggttaattcggtattgtttcctgttagttttcctgaaggcaattcaacgttttgggagtttaaagcattgcgaacatcagatacggtacatttataagcggtaagttttacagggtcaatccacaaacgcatagcgtagcgtttttgcccccagatttgaacaccgctgactccgggaatggtttccaaacgttgtgaaatcacattttcggcataatcactcagttccagagaacttctggtgtcactttgcacggtcatcgaaataatggcatcactatcggcatctgctttggagactaccggtggggcgtcaatatcctgcggcaaacttctgatggcttgagaaactttatcacgaacgtcgtttgctgcttcttccagatttttatccagattaaattcaatggtgatgttgctgcttccctgattactggaagaagttatgtttcgaatcccatcaattgcgttaaccgctttttcaagaggctctgtgatctgagattctataatgtcggaattggctccggtatagttggttcggatagaaacctgcgcagggtcgatcgaaggaaattccctaacacctaaaaaggtataaccaatgaaaccgaatagaataattaaaagattcagtacgatggttaaaacaggtctttttatactggttgttgataaactcatactgttatttctgattttagattttagattttagattttttttttgaatagcggacaaaagagtatggaatatagaaaatagattggagcgtattaagtatcccgttagacgtcatacatttcacaactcacattttacattttctatttttttacattcacttttattggcgcctcatttttaagtgacattacgccactggtaattagagtatctccggcttttagtcctgacagaattaaaatagaagagtctgttcttgtcgtagcgtcaaccatcacttctttggctttacccatattggcaatgtatactttcttaccgctttgtaccggaattatagcttctgaaggcaccacaatggcatcttttacaatgtttagaggcagttttacatcggcaaaagttcctgggaaaagctttccgtcaacgttatcagcaatagcacgaatttgcagtgtacgtgtagcaacttcgacttccggctcgatggcgtatatttttgctgtatagactttatcggaacctgaaacggaaaaatcgatagttgatccggattttacttgtgaagcatatttttcaggtatcgaaaatgtaatttttagtttaccggtatttaccagtttggcaaccagaacggtaggagtgatgtaggtgcccggagaaattgaacgcaaaccaacttttcctgaaaacggagctttaacggaagttttggcaatttgagctctgattaactgactttgtgcctgtgcagaagcatgatcggctttcgcaacgtcaaactcttcctgactgatagcttccttctgaagcaataattttgctcttctctcattttcagcagccagaccttcacgggttacggcttgtctaagttgtgcttttaattcgatgtcatttactttaaaaagtacctgtcctttgtttacaaaactgccttcattgaagtaaatcccttccacaattccggaaacttcacttcgaatttcaatttgttcattggcttcaatagaacctgatagtgacaggttgttgtcgaaggttgcagttttaacaactattccggttacagtagtaggagtatctttgtctccaaactttttcgattcgtcgtttttctttttattcgacacgactctgtaggcaataaaacctcctaatacgatgatcagtagggcgtaaactaagttttttactttcataaacttgaggtaaaggtatttttttggtgtatgttttgagtaagcacacaaatttaactttttgttgtgaaatctggagagcttagcttttatttaacatttgtacgtacaaacattacataaaactaaacttagactctttttctgcaccaaggtttaatacaggaactaaaaaaaacaaaataaataatcaactcgttggttttaaataatataaaaattacttaatgcataatcccgatgcatcgggatatataaaagtatataaaaagaaaccatagttgcagctgtgttcaaaataagtcaaacgcctgatttaaaaatattaattctatgtatgtacctgttaaagaatgattatatccaacgggttaaataagttaaagtttacatccttttaaaacttcttttctatggttttacccacaaaaagggtagaattacggtttctgcaaatcaaaaaaatccgttaaagatgattttcgaagcattttgtccgattttatttgcactttatcgattttattcgtaacattgataggcttaaacaaaatgatctgttttttaaggactaataatgtttttgagagttaagcgttaaaatgtgtaggttttttatttgatttaaagttaaaatagttaaataaataagcagtgtagttaacaactgtttagacattttttaagtttcaacaccaaatttacttgtttatgctgaaaaaattacttgttggtttatggatggcattgttggttgttgctatctcatttctcttctggcagaatgaatttaaatacagtttacctacgccggttcctcaaaatttcaaagcgatagctctaggaagcaagattgatttaaaatgttgtttggcagatcgaaaacccatttttatccatttcttcaatcccgactgtccttgttctcggtttaacattcctcatgtttcggaactcattaaaaagtatggtgaccggattaattttaaaattgtggtgctcaacaaagagaggtctttcactatagccgaaattcagaaaaaatttgatgctgaaattccggtttatttcgatcaggctatagcgaaaagttgtggtgtattctcaaccccgcaggctgttcttctggatgcttctcagaatttgtattatcgtgggaactacaataaaaccaggtattgtaccaatgccgacagtaattatgcgcaaatagcaattgattccttattgaaacagcatcattctccttcgtttgatgttttagctctgagagcttatggatgctcgttaccaaaatgcaataaataaaccaaattcttaaccaaaatcattttaatttatgaaaacaagagccagtttgaatgaacaagattatttgcacaatttcatgtctacgatgacccaacgatcggacaccattgtcaattatgttttagcgatttattttctgtttggaattgctttagcttttaaatatgatacgtttgaaatcggagtaggagtaggtgttttaaatttgctgttgtattattcggcaaagtttttctttaaaaaatctaacttttaccagtatgtgctggctattgttttggccatatttatggcacagtacatctatcaaatgcatggtttgtttgagatgcattttaccgtttttattgccagtacaattttaattatctatcaaaactggaagctccagattcctttgacacttttggtggtcttgcatcatggggctttggcgtatttgcaaaatcaggttttcaacgacccaaaaggattacaattgtatttttcacaggttaattttgatgtggaaacctttgtaattcacgtcgtcttggcggcagtggtattttttatgaatgggtattgggcgtattattttaaagaacacagtcaaaaccacatttctaaaatttcagacgaatacgaattagaaaacatgaagctggcttctgcaaagtacagttcactaaccgctactaaagattataatgatttcattcacagaactacactggatttgaaattaccagtaagctctgtgcttaaacttattgacgtttccaaaggacacacagacaatgataaattattgaattatctggagatgatgcgtgaaagcgccaagagaattgacgacctggtaaacgatattcatgtgaaatctactgatagcaggaattaaaacaacaacttgcagtgtgttttaaatcagtgatttatacattttaaaatacaggcctaagataaaaaatggtattgcttattaattttaaatacaggatttatggacaacagaattactcgcccgactccatccgacagagaagtcgactggaacaaaacaaaagtattattaagtaaaacagatacaaaaggaaccattttatatgcaaatgaggcatttattgatgtttcgggatatgatgagcacgaattaatcggtcacgctcataatattgtccgtcatccggatatgccgagagttatttttaaatttctatgggatagtattaaatcaagtcagaatatccatgtcattatcaaaaacatgtctaaaacgggacgattttattgggtggtaaccgattttaaaatcattgcagatggtgatggtgaaattgttggttacttcggaacaagaaaagctgtgccggaagaaatcattaccaagtttattgatcctctgtataaaaaactgctgcatattgaggaggtaagcggaatgggtgctgccgaagattatttgattggctttttagaagaacgcaaaaaaacgtatatggagtacatcgatcatttgattgcgacaggaaaagacgataagaacaaaataagcaaaggactttttagtggtctgtttgaaaaaaaagcagctcctaaaaaatagaactttaactaggttacatatacttcattgtaaaagataagcattcaacttagaagaatttgtcccccaacgaattcaaatcaccaaaaacatcagttgttaaaagcttggcctttaccacaatgaagtatatttttttttataaatttccataagccttcgacttcgctcagggtgaccaaagtatagcgatatttggtttagttttcataagccttcgacttcgctcagggtgaccaaagtatagctgtatttagtttagttttcaaaagccttcgactccgctcagggtgaacaaagtatagcgatatttggtttagttttcataagccttcgactccgctcagggcgaccgcaatagctgtatttgatttagttttcataagccttcgacttcgctcagggtgaccgtagtatagctgtatttattttagttttcataagccttcgactccgctcaggatgaccgtagtataactgtatttggtttagttctcaaaagccttcgactccgctcaggttgaccgtagtatagctgtgtttattttagttttcaaaagccttcgactccgctcaggttgaccgtagtatagcggtatttagtttagttttcataagccttcgactccgctcagggtgaccgcaatagctgtatttgatttagtttccataagccttcgacttcgctcaggatgaccatagcgttcttgtttagaatatccgtagtaaaacacaatatcagtatcttaacatctcagcaccttagaaccttagaaccttagtaccttagaaccttagaaccttaactaatataattccaaatgtttttcttcttggtcagttcgataaaaacagcctttaatatggcgtgttctggtttttgtaacggtgcgtcctcttttaggattttcatggcataattacgtgccatacctagaatatccctgtcgcggacaatatcggcaatttgaagatttagaacgccgctttgttgtgttcccatcaaatcacccgggccgcgtagtttaagatctacttcggcgatttcaaaaccatcattggtctgaaccatggtttccattcgtgttttactgtcggaacttaatttgaaactcgtcatcagaatacaataactctgttcggctccacgtcctacacgtccacgcagctgatgcaattgcgacagaccaaaacgttctgcgctttcaatgatcattacactggcattaggaacgttaacaccaacctcaattacagtggtggctaccatgatattggttttaccttcagaaaaacgtttcatctcagcatctttatcagcaggtttcattttgccatgcaggatagaaatagcgtattgaggtaatggaaaatcacgagaaatactctcataaccgtccatcagatctttaaaatccattttttctgattcctgaatcaacggataaacaatataaatctgtctccctaatgcaatttcatcacgcaggaatttccagactttcaaacgattactgtcgtatcggtgaaccgtttgaattggttttcgtccgggaggtaattcgtcaattacagaaatatctaagtccccatataaactcattgccaaagttctcggaataggagtagcggtcataaccaaaacgtgcggaggaatttcgtttttcttccacaatttcgaacgctgttctacgccaaaacgatgctgttcgtcaattacagcgagtcccagattctgaaattttaccttgtcttccagtagtgcatgtgtaccaattaaaatttgcaaacttccgttttccagttcttcgtgaattatttttcgggctgcagttttacttgaacctgttaagagttttatgttgatatttagcgttttagctaattcagataaaccgataaaatgctgattggcaaggatttctgtaggagccattaagcacgcctgaaaaccattgtctatcgccaaaagcatactcataaaagccacaattgtttttccggaccccacatctccctgcagcaatcggttcatctgggcattgcttcccatatcagaacgaatctctttgattactctcttttgagcatttgtgaggctaaaaggtaaatgattctgataaaattcattaaaaaacgttcctaccgtagtaaaaggatgtccttttattttatgctttcgaataaggtttttagtgattaattgaagttgtataaaaaacaattcctcgaattttagtcggtattgcgctttcgctaaagcatcagtgcttttcggaaaatgaatgttgaataaagcggctcttttagaaataagccgtagttcctcgattagataagctggaaaagtttcggtaaatagagcctgagtttccagaaacagctgttccattagtttgttaatggtacggttcgaaatccctttattagccagtgtttcggtggaaggatatacaggctgcatggccgaacgaagacttctttcatgttcgctccacaattcaatttccggatgtgccatactaaattgacttccgtatagcgaacattttccaaaaatcacacaaacctcattcagtttcagactttcacgaatccatttatgcccttgaaaccaatttagatctatttgccccgtgtcatcaacaaaagtagctacaagtcgttttttattctttgcaaattcgacggttttaatattgattatttttccaataatctgcacctcagatcctgtattctgaagttcattaattttataataacgcgttcggtctatatatctgttcgggaaaaaattaaccaaatctccgtatttatgaatcccaagttcctttcgaagcagctgaccacgactgggaccaacgccttttaggtattcaatgggggtttcaaggagattgttggacatttcggtaattgtagattttagatttttagagtatagagcaaagaacaatgagtatagaacaaagagacaagattttagagcaaaatctataatctcgcctctttgctctattttctattttcaaatcgctttcataactgcgaagataaattttaattgggaaatttgaaagtctgaaataattcattggctattttaataaataaagatattgagtagatttgttcagatgtttttagaccaaacccctttataatgactaacgaagaaaaagttccttttgaaaccatgaattttgccggtgtgactttcaaggtgattaaccgacctgaagcacatactattattggcgatcttactgattttaacaatcaaaaaatatacaatgtttttgaagatacctggcgttttccggattacgaagacaatcctatatttctcttagcggaagatgatgtcgaaatggatacgtttgaaatggattacagtacagatgaaaatcaggatgtttttatactcggatttattttcaaaggcaatctaacggttaaaaaacttattagttcttttgacacagataattcacctgctctgatcgttttaggagaaacaattactgcaaacattaccttgtttggaagtgtacattatttaggtggcggcttaaaatgcgattcacttttaggagaatacaatcatggagaactttttgtaaagggtgatgttaccgcctggttgatctacagtgatgatatgtggatgcattttgaacgttttaccaatgttcaggcaattgttaatgtgggcagacctgatgttttgatttgcagtaatctgacggatacagacggatcaatcgtaatcattgaaaattaccttccttcgacacaccgattgagtgatatcgtaaatgattcttttattgaatattccgatgatggtacggagatcctgggtaataattactatgatgattgctttaaaaaaggactttcaattgttgatcagagcaaatcagatcaatatttgtatactgattttcgcgctcagtttagagaagccgtagaaacggtagttgagatggaaaaattcaaaactgaggaaaggctttacagcaatattggaaataccacacatttgtttgtttcttttgattatgaaggaaagaaatacagtcagctttcagaagaaattggaaacggatttaatattaggatgcgtggtttatggtgtcatgatacggaagaaattacactcattctcgaatatctggatgaagaggggaatccgaaataccaatggatgaatgatgaaacgacaaacggaatagagttttattgcataaaacgtgctgtaatagaagctttttattctctgacttcagagactgaagaggaagaggaaagtgaagaaatggaggaagatgaagaatacgacaacagcttttcactggaagaatttgctgtgcagtttggcaagtatgctttaccggcagatttagtaaagctgtacgagtttgagcaggaatatggcccagaaacttattcggaatgttttggtttgactattacagaagacaagaccggtataaaaacatggtcggaaaaagaagccttttacaatagttttatcgagtttgcaggagccaacggttccggaagttcgtatgcttactggctgataaatgaggatttaaacgattgcccgatagtcgtgtttggcgatgaaggaggtattcatatagtagccgaaaacaccagtaaattaattcatcttctgactttagataccgaaatttcagttgatttcgattcggcttatttttacaaagacgaagagtattatgaagagaacgaatataaggaagagtttcagcaatgggttaaaagtgagttcagtcttgatgcgttagaaaccaatgaagaaacagaagaaattgtaagcgaggctcaaaagaaatacaaaaaacgactgaatgatttcttaatcagttttgatattgaaataggcgaaaacgacgagtaattctcagagagttcaagagctctacaaaatcgaaatttctatctttgaataaaatttataaaaatgactacacatttagcacttttacgcggaatcaacgtttccggtcacaacatgataaaaatggaagctttgaagacaatgttagaaaacatgggctttcaaaacgtacgcacttacttgcagtccggaaatgtatttgtggatacagaagaagaaagtgcttcaaaagtaggttttatgatcaaacaggagatttttaaagtttttggacatgaagttcctgtgattgtaattgctaaagaagacctggaattgtgcttttctaacaatccatttttaaaagaaaaagatattgacatcaagaaactctacattgtttttgtttcgattgctttgaaaaaagaaagcatacacgatttaaaaatcagtcagtttaagcccgatgaagccagtattgatgaaaacagaatctatattaagtatgatataggtgccggaaagacaagattagaacttaaatacattgagaaaaaactaaatgtaataggaacaatgcgtaacctgaataccgttaccaatttgctggagatgtatgtttaggtttttagatctttagatttttggattgttggatctttagattgttggatcttgattgaagaaacgcgaaagacagagtcccggaactagtttttagaaattaattcgtcgtaagatctaagtagtctaagctagtctaacaatctaaagatctaataatctatctactctctcatccattttaacatcgtcggaaaagccggttttccctccttagcagcattatcaactcctaaagcgagaccgatccactcaagaaaaggcagaccaataaaatttcctgaagtaaaattagagatcagccattcagaatcatttttataaccattaggatgaaaaaccagctcgattggtaattctaaatgagaacatgcggcaaatgaccataaaatagcggccatttcttcggcttcagtgggccagttagaggctattttttcggttccaacgagttttctgtcggaagaactggtaacggcaagatgccccgcttcgtgcaaaatatcacccggatataataatttatcataatcaataataacacaattcggacctaaatctaaacccggcagaaaagtgtcattcaattccttttcaattacatctattccaatttcagtaagaaaagatataattttctttatttctgaattttctttcgtgaacatattctcgttttaaatcaaatcgcaataccaaaatccataatcaaaagcatcactggaattggtgtcacaagcagagtttgacgtttcctgagttttaggcttttcatacttgcggtaaacaatttctccaatttcaaaaggaacaggttcggagaaaattggcccatcaaaagtaaaagtatgaaattcaccattttcaccacaaacatctacgttttcaggtaagtcgttaatgaaatcctgatcgataattcttcccacaaaacttttatctaaaaaccgctcgtttacacataccacaatcgttttaaatccaagtgaaatgaattcttgtatcaaatcctgagtcggaattttccaaagagggaatacaccttcaaaacctattttagccaattgagtctcgcgatacttgcgcaaatcttccagaaaaatatcgccaaaaatggaatgtgtgattccaagactttttaattcagctaaggtttcattcataacaccttcataggtctccatcgtgggcatctccgggatttgcatgattttcaaaggtaaaccgagactttttgcttgcgcttccaacagttctacacgaacaccatgcatagaaattcgctggtattgctgattaacacttgtcagtaaacattcaattttgaaatcaggattttgcaaaattttatagagggcaagagcagaatcttttccgctgctccagttaaataaagcttttttaggtattggcatgctgttgtaattttgtctggtaaacttacaactttcattcgatttgtttgtcaaacctttgtaactttggaatttcgcccacaaatttggttcaatgaaatatacgctattattttttaccgcttttacttttgcgcagcaaacacaatttgttgattttaaaaccgtttccggacaattgactgtaaatgctgtcgaaaaaacaatttcaggcacagtcgattatcaatttgagattctgaaaccgattgatacgatcaggattgatgcaaaaaatatggcattttctaatgttcagatagataacagagaagctgtttttataagtacagataaagaattgaagattgtcggtaatttccaaaagggagaaaatcatcttacttttcaatacagcgccaaaccaaaacaagccctgtattttgtgaatatggacaactcggaagtacaaatatggacacaaggacagggaaggtataccagcaattggcttccaagttttgatgatgtaaacgaaaaggtagtatttcgtttaggagtaacatacgatagtgcttatcaggtaatttcgaatggtattttagagaataaaaaaataaacgccaatcaaacacagtggcagtataaaatggagaaaccaatgagttcttatcttctgatgcttgccataggaaagtatgataaaaaagagctaaaggcaaaatccagaatcccattagagtattatctggaaaacaaagatgcagatcgttttgaaccaacttaccgttactctaaacgtatttttgattttttagagaaagaaataggagttaaatatccatgggaaatctatcgcgaaattccggttcgtgattttttatatgccggtatggaaaacaccacttcaacacttttcgctacccgttatgtagtggattccatcggttttgaagatcgaaactataccaatgtagatgcacatgaattagcacatcattggtttggtgaccttattacagccgaaagcagtacgcatcactggctccaagaaggttttgcaacctattttgctgctttggccgaaagagaaatttacggtgatgattttttctactccaaattgtacgacaccgcacaacagataaaatttgcctccaggaccgattctattccggttttaaatgcaaaagcaagctctttgactttttatgaaaaaggagcctgggcattatttgtattacatgaatctattggcgataaagcattcaaaaaagcaataaagagttatcttaaaaagtatgcttatcaaacggtaaatacacaaaacttcttcgatgaaataaaaaaggtctctgactttgatttggataaatttcagaaaacctggttggaatcaatcgtttttgatacagcaacagccaatactttattgagtaaaaacaaatcgattcaggttcgattagaagttgataaattaaaaaagacagctttagcagagaaagaagtatttctaagtaaaactttagattcagatatttattattctgtaaaagaagctattgttaatcaattagaaaatgaaaaatacgaatcaaagagagccttattattgcaagctctgaaaactaatgaacttcaggttcggcaggcagttgcggcttctttgactaaaattccagaagacttcagggtggaatatgaaagcttgcttgacgataaatcatatcaaacacaggaagttgctttgtattggctatggagaaactttcccgagcaccgtacccgatatttggacaaatcaaaaaattgggttggtttcaacgactacaatttaagaacactatggctttcattagcactttcaacacctaattatacaaatgattcagaagtcttaatctcagagttaattgctttctcttctgcaaaatatgaagctacaaccaggcaaaatgctttagaaaaactgattgcttttaagattatcaatgatgctgttttaacgaacttagtttccgcgacaactcatcacatgtggcaattttcaaagtttggaagagatacaattcgacttttgctaaaaaatacagatttgcgtgcttcgtttgaaagaattttgactaatttaaaccccgatgaacaatttcaactaaaacgtttattggcagaggaggtgaagaaatagcaatttttagtagtaataaaaacagattggagtaatttttaaaaaaataccattgaatacttttaactcctaactcaaaacccacaacttaaaaaaatatgagagcattggttatttctggtggaggaagtaaaggggcatttgccggcggtgtcgcacaatatctgatcgaagagaagaatcacgagtatgatttgtttataggtacttcgaccggtagtttacttatacctcatttagccttgggacacattaagaaaattcactctgtttataccaatgttaccatggccagtatttttaatatttgcccatttgttgtgaaaaataaagacggagtagacattgtaaccataaatcattttaacgtattacgacagtttttcaagggaaaacgtactttcggtgaaagtaaaggtttaaagagatatataaagaacaatttttctatatcagatttcaataaactaaaaaaacttgacagtgacattgttataacggtaactaattttaccaagaatgaagcagaatacaaatcggtgaaagattgcacttatgaagaattctgtgaatggtcctggatctccagtaattatgttccttttatgagccttgttgagaaaaacaattacgaatacggggatggaggctttgcgagtttagttccaatccgcgaagccattaatcgcggggcaacagaaattgacgtcatcattctcgaaaccgaggtaaatatggacaaaacggttatcggtaagaacccgttttctttaatgatcgatttgtttcgaattgctttagaccaggtcgaaaaacatgatattaccattgggaagcttctcgcaaacaataaaaatgtaaaacttaatctgtactacaccccaacaaaactaaccgataatgcccttattttcaatcaggaagtcatgaaagagtggtgggaacaaggctatgaatatgcccaaaataaatctgaagttatgagtgataacagatagtctttcttagatttgcttagattgttagatttttggatctttagattattggatcaattgaaaaacactccttataaggtttagtttcaaaataaaagtagtccaagccagtctaataatctaaagatccaacaatccaaaaatccagactagaaaagctccgttacttagatctttagattgttggatcaatcgaaaaacactccttataaggtttactttcaaaacagaagtagtccaagccagtctaataatctaaagatccaacaatccaaaaatccagactagaaaagctccgctacttcattcttgatatacgccaaagcggcattgcttggagattgcttctccaataaatcatttaaaattacttcacgcaatttatcagcactgtctacacgatcgctcatggcagttttgcggatgatttgtatggtcgaattttttgctgtggtaataatcgtccagcattcatccgacatataaatttgttgggttaaattgtgctcaaactcttgttcgatctgatcaatcacgaaattctcgtaatcgtgtttttcatttgagactggagcgatacggatcaataatttggtcagattgatacgctctaaatataaagtcatacgctcgtaagcttgtaagcgtataggtaaagattctttatgtgcttctttgtttaataaaaaattacgctttttatcgaaattcttaatgtgcagttcaaaaaaactgtaggcaacaaatccggtaacgacagcaggtaaagtgtaactggctaattctataattcttgtaaaatccattgggtttaaatttttagcaaaaatatacttttcggggagaaatccactttaaaattattgtaataacaaactggaagtatacttttgtgatgagattttaaaactacttcaaatacagcctgaatggacacctacattataattttactttgtttagctgcttttgcggcaggatttattgatgctatagtaggcggcggcggattaattcaaacaccaatgggtttgattctattgccaaatttaccggtttctaccgttataggtactctgaagttacctgcttttaccggaacttctttcgcagcctttcaatacctcaaaaaagttgtaattcaatggaaacttttaatcatcatgatgtgtttagctgttccctctgcatttctggggtccacgctgctaacctacgttagcaacgattttatgaaacctcttttattggtagtattatcacttttgctgatttatacgtataccaagaagaatttcggacaacatgaagccaaagatcattcggccggaatacaaatactgtatgccgttgttatcagtgtaattgttggtttttatgatggttttatcggtcctggaaccggcagttttttcgtggtggctttcatagcacttttaggatttgattttcttcacgcgtccgcaaatgccaaaatggtaaatctcgctaccaacttcggctcgatttgtttgtttatgataaaagggaaaataatctggacaatcgcaattccaatggcgataagcaacggacttggtggttggcttggcgcaaaactcgccattaataaaggaaacggttttattcgtgttttctttttagtggtcgtaattggtacgttaatccgattttcttacgatgtgttttataaataggtgctgagttgctaagattctaagggtctaagttttccattggttttcgtttctaataaataactattaataaatttcatacattgtaataaataattctcttgaaagtttagataaacatgtccactaaataggttagtgcctgataatctatattattagaaaaacaaaaatcttagcacctcagaaccttagaatcttagtaacttattaaagctataattcttaattttgcatcactatggagaaaaatttcatgcaaaagtacattgaccagctcaatgaagcgcaacgacaacctgttttgaaaaaagacgggccaatgattattattgctggagcaggttcgggaaaaacccgtgttttaacaattagaatcgcctatttaatggctcagggtattgatgctttcaatatcttgtcgcttacttttacgaataaagctgcccgcgaaatgaagcacaggatctcagatattgtgggagcttctgaagcaaaaaacctttggatgggaacttttcactcgattttcgcgcgtattcttcgtgcagaatcagaccatttgggttacccttctaattttacgatttatgactctcaggattctgccagactgatttcttctatcataaaagaaatgcagctggatagggacatttataaaccaaaacagattttaggtcgtatatcaaattacaaaaacagtttgattacagttaaagcctatttcaataatcctgaattggttgaagcggatgccatggcaaaaagaccgcgtttaggagagatttatcagcaatacgttgagcgctgttttaaggccggcgctatggattttgatgatttgttattgaaaacaaatgagttattgaccagatttccagaagttctagcaaaatatcaaaaccgttttcgttatattttggtggatgagtaccaggatacgaaccactctcaatacctgatcgtaagagcgttatctgataaatttcagaatatttgtgtggttggagacgacgctcagagtatttatgctttccgtggagcgaatatcaacaatattctgaacttccagaaagattacgaaggcgtaatcatgtttcgtttagagcaaaattaccgttccacccgtaatatcgtggaagcagcaaatacggtgatggaacataataaaaccaaacttgataaagttgtttggacggcaaatgattttggcgcaaaaattaaagtccaccgaagtttaacagatgctgaagagggacgctttgtagccagtacgatttttgaacaaaagatgcaaaaccaactgcataatggttcgtttgccatcttgtaccgtaccaatgcacagtcacgtgcgatggaggatgcacttcgtaaacgagatattccctatcgaatttacggtggtttatccttttatcagcgcaaagaaattaaagatgttttgtgctaccttcgtttggtaatcaatccgaaagacgaagaagccttgattcgtgtaatcaattatccggcacgtggaattggagatacaaccgtcgaaaaacttacgattgcggcaaatcattacaaacgttcgatttgggaagtaatggttaatattgacaaaatcgatttaaaattaaatgccggaacaaagaataaaatcagagattttgttacgatgatccagagttttcaggtcatcgatcagaatcaggatgctttttatgttacagatcatgtcgctaagaaaacaggacttgtccaggaattaaaaaaagatgccacgccggaaggaatggctaaaattcaaaatattgaagagctcttaaacggtttaaaagattttactgaaggacaaaaagagattgatggtgcaagaggagctttgtctgagtttatggaagatgtggcattggctacagatttagataaagatacttctgatgaagatcgtgtggcattaatgacgattcaccttgctaaaggacttgaattcccccacgtttttgtagtaggaatggaggaagatttattcccaagtgcaatgagtatgagtacacgcagtgaattggaagaagaacgccgtttgttttatgtagcgcttacccgtgccgaacatcaggcttatttgacctatgcacaatcacgttaccgttggggaaaactgaccgacagtgagccatcgcgttttattgaagaaattgatgggcagtacctggaatatttaacaccggccgaaaccaattatcgctataaatctccaatcgacggagatatttttggagatattgataagtcaaaactacgattgataaaacctgtaggaagtacaccgcctaaacatgttacagctaatgagccaaaatcggatttgaatattcgaaaattaaaacccgttactggaaccagtccaaacaatggagccgccaatttgtttgataataagctcaccattggaaacatagtgatgcacgaacgttttgggaaaggtgaaatcgtcaacatggaaggtgttggtgctgataaaaaagctgaaataaaatttgaagtgggcggaatcaagaaattgttgttaagatttgctaaattagatgttgtagggtaaaaagagtatagagaaaagatgatagaaaatagatttttaaagaaatttaattttttataactggatttgattttcaaccctcttaaattttcattactttttaaaaggataaagattctataaatctattgtaattgtaatgttgtggtttattttaaaaatttaaaaagaactaaagatcagtctttgttctataatctaacttctttattctaaaaaaatggctgagttcataaaaatatattcggacaaacccagtgaagctgcaatagccaaagtggtaaaagtacttcagagcggtggtttggtgatttatccaactgacaccgtttatggtttaggttgtgatattaccaattcgcgtgctttagaaaaaattgcaaaaataaaaggcgtcaaattagagaaagcaaatttctcgttcatttgtcacgatttaagtaatttatcggactatgtacgccaaattgatacatcaacgtttaaaattcttaaaagagcattaccaggaccttatacttttattctgcctggaaacaataatcttcctaaagagtttaaaaagaaaacaacggtaggaattcgtgtaccagacaataatattattcttgaaattgttcgtcagcttggaaatccggtggtctcaacttctattcgtgatgaagatgatgtaattgagtataccacagatcctgaactgatctttgaaaaatggcaaaatctggttgatttggttattgatggcggatatggcgataatgtagggtctacaattattgatttatcagaacacgagccggtaatcgttagagaaggaaaaggggatgttggtattttgtaaattaaaacttaaattattcttcaaaaattaagattgtaaattaaaaattttgttaattagtaatataattctattacaaattctatgaaaaacataatttgcatttcttttgtcacaagagacaaaaaacaagacataagataattcttagaaaaacctcatcaaacaaactttcatttatttttgaaagtttaaaaacttttacttacatttgtttcatggaattcaaagaagcaaaaaataagttcgtacaaacctggggagcattaggttctcagtggggtattaataaaaccatggcgcagattcatgcgctgttaatggtttcgcacgaagctgtttctatggaagacatcatggaggaattacaaatttcacgcggaaacgccagcatgaacctgagagctttaatggattggggaattgtgtacaaagagttcaaagccggagaaagaagggaattctttactgctgaaaaagatcttgacgaactggccgtaaaaattgccagagaaagaagcaaaagagaaattaaacctgctcttaaaatattaaaagaagtttctacaattggagcaaatgatactgctgaagaaaaacactttgtcgatcagacttctaaattgtatgattttgttttaaaggcagataatatgatggataaaatgaccgaatttaatgaaaattggctgggacgtcttgtccttaaaatcatgaaataaaaaaatttaatcataactttcatttttttctgaaagtttaaaacaactcaagcaactatgaaaaccgcatatttaaaatacatcaatacatttgccattgcccttcctttactaattgcattaacctatccgttttttgatataggtgttctcttatacgctatattagctattgctgctaccggctttattcaattttgcttagcggtagtaatgtttatagaaaatccaagggatacaagtatacatatatacatggcgggtgtgctgatcttcttcctactatggttacgcaatcacattgttggttatgataactttttaactgttatcttagtccctgctccttttctgctttcattttatctctcttttttagtttatataaaacgataattataattctcaggaatttaaaaaacaaagctttatatttcatatttttctgaaagtttaaaacaaataataactatgaaaaacctaaactatttaaattacttttttgttggattaccattaatcttctattcgctatcgctaataatcgaggagtttatatttttaggaatgctttcaacaattctaaccggaatatttcaggttactatcggaatacaaatgatacgggatgaacctcaggataagaatcttaaaatttatataggaagcgttgtgctgttttttttctcactcttcctcttttacaaactggaattacatgattttttcagttttaccctatttggcatacctccttttatcgcaatttatctctctgtaataatctttaaaaaagcacaccaatgaatttcttaaaagcagaatggaaaaacttagcactttttaattatgaaattgatgctaaacttttagaaaaatatactcccagcggtaccgaaatagatatttgggacaacaaatgttatgtgagtttggtaggattcttatttaaagacaccaaagttctcggattaaagattccttttcatactgactttgaagaaattaatttaagattttatgtcaaaagatttgaaaatggcgaatggaggcgaggtgttgttttcttaaaagaaattgttccaaaaaaatccatcacttgggttgcaaacactttgtatcaggaacattatgaaactaagaaaatgagacataaaattctggaagatgataacaataacacttttatctatcaatggaaaaataaccaaaaatggaatacaattaaagtcgacactaaaaagaagacaacagaaatagaactcaattctgaagctgaatttatcactgaacattatttcggctataccaagattgatgaacataagacttttgaatatgaagtcacacatccgagatggaaacaatacaaagtttccaattataaaattgacatcgattttggagaaacttacggacaagactttgaatttcttcaaactcaaaacccaacttcggtttttctggctaaaggctcaaaaattaccgtcaagaacaaaagagaaattgagttgatctctgtcgaagaatcttatacctaaaatgtttcattttaaaaccaaaaaactatgaaaacgctcgaaaaccaaaccctactttacgatgaagattgtcccttatgcagtttgtatactactggctttgtaaaaagcggcatgttagatcaaaacggaagaaaatcatactgtcaattatctgaagaagaacaaaattttgttgatttaaaacgcgctccaaacgaaatcgctttgattaataaccaaacaaaaacagtaacttatggaattgacagcttaattaaagttgtcggtttttcttttccgcttattgaaaaaattgcaactctaaaaccgattcactttatcctcaaaaaaatgtattcttttgtttcctacaatcgaaaagtcattatccccggaaatgtcgtcgaagagaacaaattacaatgtactcccgattttaattataaatatcgctttctgtttatcggatttgcgttaacagtaacaagcgctattctttttggttatgctaatcttattccggatttaccgaaaaccagtgtttcaagagaaatcatgattgcattgggtcaaattgttttccaaagtttgtttttattccaatttgacagacaaaccattatgaattatgccggaaatctaatgaccgtttctttaatgggttccttaattttaagtcctgtcctgcttctgagtaaatttacaccgctttcagaatttattattttaggctggttcggagtcaccgttttgattatgtttttggaacatcgcagaagaatcaaaattttgaaacttcctgtttacttatcttacacctggattctctatcgaattattgctttattcttcattttaaactgatttaaaaaatcgtcacagattgtacggattaccattcgggcaattcgtaccaaaaaaatacaacaatgaacaaactcatcatcgcggccggaacaggatttctgggacaggttttactacatcatttcaaagacaaatttgaagaaattgttattctgacccgggggaagtcacaaatcattgatggaataaaatatgtgaactggaatgccaaaactttttcaggctgggaaaacgaactggaaaatgctacggtactaattaatctggcaggaaaatcggtggattgccgctatactaaaaaaaataaacaagagatattattatcccgaattgaaagcacaaaaattttaaacaaagccgttttaaattgtaaaaacccgccaaaacattggctcaattcgtcaacttctaccatttaccgtttttctttagacaaacaaatggacgaagtcgagggcgagatcggaaatgacttctctataaatgtggctctctcgtgggaaaaagctttttttaaaacagaaactccaaataccctgaaaacggcattacggacatcaatcgttttgggaaaaaacggcggtgctctgcttccgctaaaaactttggctaaaataggttttggaggaaaacaaggaaaaggaaatcaatggatcagttggattcacgaagatgattttgcacgtgcaatcgagtttataattaaaaaagagatgaccggaaaagtaaatatcgtttcgccaaaccctatttcgaatactgactttatgcaaaaacttcgaaaaacagttggtgtctcttttggaattccacttcctaaattctttttagaaatcggatcttttatcattcggacagaaacggaactggttttaaaaagtcgaaatgtgattccgaaaagacttttagaaaaaggttttgcgtttaagtttgaaaatattgatccggcttttcagaatctcttatcctaaaagaatcgaagtactctactgaaacccaaaaaactatgaaaatcactttgtgctaagtctcgtatagtccctgcgggacagttatgcggggcgaagtttaccaatatgtaatcactccgagattaattggcccttgtatttaattttaattaatcgtcacacttcaatccgtgaaactactcctttcgaagcaatacaatgctaatatatcttatctcgaaaaaatatcccgtaaaggcttaccaatcaattaatctcggaaagattacatattggtaacccgtatccccaaacttaaaaaatgatactaaaaatgacagtcctaaaccttacaacccgaataaaagcctctcaaaaatcggtatttgatgcttcaagaaatattgatattcaccagcaatcggcaagtccatcaaaagaaaaagctattgccggtgtgacaactggcttaatccatttaaatgaaacagtaacctggcgcggcaaacatttcggtttttatctcactcacaaaagccggattacagcaatgaaaccttacacctactttgccgacgaaatggaacagggcatgttcaaatctttcaaacacgaacatttttttgaagaaaaagacggatttacgatcatgaaagataaactgcaatatgaaactccttttgggattttaggtgaactttttgatattttatttttagaaaaacatctcactcgttttcttctggaaagaaataaagttttgaaagaaactaccgaaaacaaaattaaaggaacgtaatcatcagccaccaaaatatcggcacactttccacccaaaaagaagtataatatttggagcgattggggttcgcaaatacaataaataacatcaatataaaaatcatgatcagattgataaaagcatcatgataattaaacgtagaaacaaaaacttctaaaccccaaaaaggaatcagcaagaagagtcctaaaattttggttcgttttacccctatggtttggggaaccgtttgtaaatgcggatcgtcattggccaaatcgataatttcaaaaaccaaaaccagaacaaaaaccaaaacaaaacgctgaatgcattttataaaaaaatcactagtaaaaggaatttcggcatttattaaaggtaaaaccaaggtagcgcccacccagcaaactgccacgatataaatttttacaccttcccagtttcgtgcatttctccgattcggaaaaaacggaagggtataaagtgccgttatcaaaaaaatcacaattgaaacaatttgagtaatccgcttcaactgaaaaaaataatagcccaccaaaaacagtgaaataaaactcaaaacagcaataattttcaactgatttccaatttttctcttttgaacacgaaccaaaacatcgtatttaacaaaattataccccacaattgttccaaaaaaaccaaacaatgccatcgactcatcgtactgaatatgaaacacatgaaaagtaatccgaatgagtgcgtaacatgataaagccacatgaatactgccattcaggtaaaaatctaatatgtactttaacactttcattattcaaatctaatcaattattaagaaaccatatctttaattgaaaatttcacaaaaaatgaagttaaaaatgtgcattaaattattattaatacttaattttgcgcgactaaaaaacaacacttttactactatatgaaaacagatgcttttgctttaagacacattggtccaagagaaacagatcttcaacacatgttacagactatcggagttgaatcgatcgaacaacttgtttatgaaacccttccggatgatattcgtttaaaagcaccattaaacttagatccggctatgacggagtatgagtttgccaaccatattcaggaattaggaaagaaaaataaagtattcaaatcatatattggtttgggttaccatccaacaatcgttccggctccaattcaaagaaacatttttgaaaacccgggatggtatacagcttatactccttatcaggctgaaattgctcaaggtcgtcttgaagctattttaaatttccagactacggttattgaattaaccggaatggaaattgccaatgcctctttattagatgaaggaactgctgccgcagaagctatggcgttattatttgacgttcgtacacgtgaccaaaagaaaaacaatacaaacaaattctttgtttctgaagaaattttaccacaaactttatctattcttcaaacacgttcaactccggttggaattgaattagtggttggaaaccatgaaacatttgatttttcaaatgaatttttcggagctattttacagtacccgggaaaatatggtcaggtaagcgattacagcgcttttgttgctaaagcaaaagaaaatgaaattaaagttgccttcgctgctgatattttatcattagctgctttaacttctcctggagaaatgggagctgctgtagtggttggaacttcacagcgttttggtgtaccaatgggctatggcggacctcatgctgcattctttgccactaaagaagaatacaaacgatctatgccgggccgtatcattggtgtttcgatcgatgtaaacggaaaccgtgcgttacgtatggcgttaggaactcgtgagcaacacattaaacgtgaaaaagcgacttcaaatatttgtactgctcaggtattattagcggttatggccggaatgtacgcggtttaccacggaccaaaagggttacaatacattgcaaacaaagttcatgcatcggcggttactgctgctgaagctttaaataaattaggcgtttaccaaaccaacactgcttactttgatactattttagtaaaagctgacgctcaaaaagtaaaagctgttgcggagaaaaacgaagtaaacttcttctatcctgatgccgaatccatttcgatttcattcaacgaaacgacttcaattgcagacatcaaccaaattattgccatttttgctgaagctttaggaaaagaaacttttaccgtttctgaattatctgaggcaagtcagttaccggcttcattagaaagaacatcttctttcttaacacatgatgtattcaacaatcatcattcagaaagtcagttgatgcgttacatcaaaaaattagaacgtaaagatttatcattgaatcattcgatgatttcattaggttcttgtacaatgaaattaaacgcagcttcagaaatgcttcctttatcaatgcctaactggaacagcattcacccttttgcaccagttgaacaggcagaaggttacatcaccatgcttaaaaaattagagcagcagttaaatgtaattaccggatttgcgggaacaacattacagcctaactcaggagcacaaggagaatatgccggtttaatggctattcgtgcttaccacatgtcaagaaacgatggtcaccgtaatgtatgtttgattccttcatcagctcacggaaccaatcctgcttctgcagctatggccggaatgaaaatcattgtaaccaaaactactcctgaaggaaacattgacgtagaggatttaagagaaaaagcgatcgaacataaagatgatttatcttgtttaatggtaacgtatccttctactcacggagttttcgaatcttcaatcattgaaattactaaattaatccacgacaatggcggattagtatatatggatggtgctaatatgaatgctcaggttggtttaactaacccggctacaattggtgctgacgtttgtcacttaaacttacacaaaacattcgctattcctcacggtggcggtggacctggagttggaccaatctgtgtgaacgaaaaactggttcctttcttaccgacaaacccaatccttaaagtaggtggtgaacaagcgataacagctatctcctctgcaccttacgggtcagctttagtatgtttaatttcttacggctacatcacaatgatgggtggtgaaggattaaaaagtgctacagaacatgctattttgaacgctaactacatgaaaacacgtttcgaagggcactacccaatcctttatacaggagaatgcggaagagcagctcacgaaatgatcttagattgccgttcgtttaaagaaaacggaattgaagttggtgatatcgcgaagcgtttaatggactatggtttccatgctcctaccgtttctttcccggttgccggaactttaatgattgaacctacagaatctgaagatttagcagagttagatcgtttttgtgatgcgcttatctcaattagaaaagaaattgaagctgcaacagctgatgataaaaacaatgtattaaaaaatgcacctcatacattagcgatgttaactgctgacacttgggatttcccttattcgagagaaacagcagcttacccattagaatacattgccgacaataaattctggccttcagttcgtcgtgtagatgacgcgtacggagacagaaatttagtttgcagctgtgctcctattgaagcttatatggaaaactaaaaactaaggttttcttttaatataatatccaaacccgacaggtttttaaaacctgtcgggttttgtatttcaacacattttcctacttatgtttcatttataacaaatcaaaaaacactttttactctaagagaaaaatcacactcgtaaaccgccgatcgcaaacgtttgaaatctcgctaaaatctataattcattataaaataaccaatatatctcccaaaaaattattattcctcaattatatgcgtgcatagtattttttatgatagttatcatgattttatttatactttagccctaaatttaccggacaataaaggaataatgaaaataaaaataataggtataggaagttacattcctactcaagaagtaagcaatactgactttggtgatcatgtttttttaaatgaggacggaactccttttggttaccctaacgaagttgtaataaaaaaattcaaaggcatcaccggtatcgaaaatcgtcgttatgccgaagaccaacatacctcatctgatttggccttttttgcttccgaaaaagctcttgaaaatgctaaaatagatcgcgaaaccttagactacatcatttacgcacataattttggtgacgtaaaagcgggaacccatcaaactgatattcttccaagtttagccacacgtgtaaaaaacaaactaggaattaaaaatcctaaatgtgtcgcttatgatattatttttggctgtccgggctggattgaaggtgtcctgcaggcgaatgcctttataaaatcaggcatggcaaaaagagtgatggtaattggttctgaaacactatcaagagtggttgacgatcacgatcgtgattcaatgatttattcagatggtgcaggtgtttctattttagaagcttctgatgatgaagcaggattactatcttatgaaagtgccacttttgcaactgatgaagccaactacctattctttggaaaatcatacaaccctgatttagatccagacattaaatacatcaaaatgtacgggcgtaaaatttacgaatttgccttaagtcaggtaccatgtgcgatgaaaagctgtcttgataaaagtggaatatccattgatgaagtgaaaaaaattctgattcatcaggccaatgaaaaaatggacgaagccattattgcccgtttttataaactatacggaaaaacacctcccgaaaacattatgccaatgtgcatacatgatttaggaaattccagtgttgctacagtaccaactctttatgatttattgattcagggtaaactggaaaatcacgaaataaataaaggtgatgttgttatttttgcctctgttggagcaggaatgaatgtcaatgcttttgtgtacagatattagtttttaagtcgcagtttacagtatgcagtcgcagtttgcagtatactgaatactgtcactgaatactgtgactgtaaactgcgactgaatactgtgactgcatactgtaaactaaaaaagtccgtatcctatggtgcggactttttttagtatatttgcgacctaattataaaatcaagaacgagaaattgtttcgttcctcgcaatgactatgtacgaaaaaacgtttcccaataaaagattcaaacttactttagaatttttacaaaaacacgttaaaacatcagagactatttttgattttggtgtaccaaatccattctctaagataatggaagaaaatggttatactgtaaaaaacacaaaaggtgaagatctggacaacgatcaaacggctttacaaacggaagaatatagtgtttttaccgcttttgaaattttcgagcatttgcttaatccttataccattctgcaaaatgtaaaatgtgataaattgttaatatcaattccgttgcgtttatggttttcatctgcatatcgttctaaaactgatatgtgggacagacattatcatgaatttgaagactggcaattggattggcttttagaaaaaacaggctggaaaattaccgatcgtcaaaaatttacacatccggtaaaaaagtttggtttcagacctttattgagatatttcacacctagatactatatagttgtagctgaaaaagttaagaactaagattgctgattaacgatttttgattttagatttttagatgactttcacagaatctaaaaatctaaaatctaaaatctaaaattattaaaatgaagtattacatcgtcattccggctcacaacgaacaggatttaattggcttgaccttacagtctttggtttcacaaactgttttaccctcaaaagttgttgtggtaaatgacaattcaacagatcgaaccgaagaaatcgtactggattttgcaaaagaaaattcttttatttctgttgtaaacaaaacatccgatgcgattcatatgccgggaagtaaagtgattcaggcgtttcagaaaggctttgaaactttggattccgactatgatattattgtaaaaatagacggtgatcttatttttccttccaattatttcgaaactataatttcgcattttaagtctgattcaaaagtaggaatggcgggaggtttttgttacattgaaaaaaatggagactgggttttagaaaaccttaccgataaagatcatattcgtggagcactcaaagcctatcgcaaggaaacatttcagcaaattggcggtttaaaacctgctatgggctgggacactgtagacgaactgctttgtaaatattacggatggaaaattgtcactgacactactttacacgtaaaacatctgaaaccaacgggtgctaactataacaaaaccgcccgatacaaacaaggcgaagcattttatactttaggatatggtttctggattaccgcaatcgcatcggctaaactggccatgatgaagaaaaaaccatttctctttttggattatatccgtggattctggaaagcaaaaaaagcaaaaacacctttactcgttactccggaacaagctaaatttattagaaattaccgctttcaaaaaatgaaagaaaagttaatttgattcggaaaccaaccgaaaagacttaactcataacccaaaactcataacttctttttaccttagccaatatttgtaaaactatgatgctaattcgttacttatcccaagttgggaaatattttttaatgctgaaagagattttcaataaacagaccaaatggcctgttatgcgacaattaatttttaaagaaattgatgatttaattattgactctctgggtatcgtttgctttatctctttctttgttggaggtgttgttgcgattcaaacggctttaaacttaactaatcctttaatcccaaaatatttaattggttttgctacacgtcaatctgtgattttggagtttgctcctacttttatttcggtaattatggccggaaaaatgggatcctttattacttcaagcatcggaactatgcgtgttacagagcaaatcgatgctttggaagttatgggtgtaaactctcttaactatcttgttttccctaaaattattgctttactattatatccttttgtgattggaatcagtatgttcctggggatttttggtggatggctggcaggtgtttacggaggttttacgagcagcaatgactttataattggagcccaaatagaattcattccttttcacatcgtttatgcttttattaaaactctaatatttgctatgctgttggctaccattccttcttttcacggttattatatgaaaggcggagcactagaagtaggtaaggccagtacggtatcgtttgtttggacttcggtttcaatcattctttttaattatatactaacacaattgttactaggatcatgatagaagtaaaaaatttagaaaaatcatttggcgacagcaaagttctgaaaggtgtttcgaccgtttttgaaactggaaaaacgaacttaattattggacaaagtggatccggaaagactgttttattaaaaagcctgttaggaattcatactcctgataatggaactattgaatttgatggccgcgtttattcagaactggatccggatgaaaaaagagaattaagaactgaaatcggaatggtttttcagggaagtgctttatttgattcgatgaccgttgaagaaaatgtagcattcccgttaaaaatgtttactaacgacaacagagctaaaatcaaagaacgtgttgattttgttttggaaagagtaaacttaattgatgcccataaaaaattaccgtctgaaatttcgggaggaatgcagaagcgtgttgcaattgcacgtgctattgtaaacaatccgaagtacttattttgcgatgaacccaactccggtctggaccccaatacttctactctgattgataatctgatcaaagaaattacagaagagtacaacattactacagttattaatactcacgatatgaactcggtaatggaaattggtgagaatattgtattcttaaaaaaaggagttaaagcatggcagggaactaaagaagaaatcttcagaacagataacgaagccattgtgaaattcgtctattcttccaatctgtttaaaaaagtacgcgaagcctatttgaaaggataagattttaaaattctacaaaaaaaaataaattccaaattccaactttataagtatcggaatttggaattttttattgagtttcccaagaaatttgggatttggaattaaaaaaattggcattttattgcattaactccacttcggcatttggattgaacaggtatgtttttcctgagctaatttcgatacattcaaaacgtttggttctaacggccaatttcttgaatactttaccatttttaatcttgaatacacttccatagggaatttcaaaaacatagttcttatcgttgtccgaatcgtattgttttaacgccaaagacaaggtggtatccgtatcactacttgctgacggattcttaaaatgccgggccaataacggcaataaagtacttgggaaaatctcaggacgaataaaaggaaccatcattctttgaaaggtaaacttccattcatttccatgaggtttaatatttctgccaaacttttcgaacgccactaaatgcgaaatttcatgaatcagcgtgatcagaaaacgatatttattcaaacttgcattcaccgtaatttcatgtttaccactaggccctcttctgtaatccccatgacgcgtctgacgctcattcacgattttcagatgaacctgattggcaacaatcaaatcaaaaacaggccttacagcatgctccggtatatatttagctaaagtttcgctcaaaataattatgaattataaagtatgagttattaattctagttcagattcttttttgatgtaattaggatgcttttgataattttcaacacttcctcacattgattgtgcatggattcaaactctaaaatcgaaacataatcagttgcccgtaatagctctaaccaatacagtgactcgtcgcactctttttgagaaattgataatttatgtataaaatcagctttgctttgtgcattaatagcttcacgaacatttgctcctactgaagtaatagaacgtaaaaattgtttactcattataaattctttcttttcagaaattaagtatttataaaaattaactcccctaactgctagttcaaaacttttaattttaataatactataactcataactcataactcaaaactcataattaactacggattcgtggacgaaacttctaaaacctttccgttaaaatatttatttccgttgagcgtaaaatcataaatgtaggttgccattccttcggcggatattggcgcctgataacccgggaaagcttcatttagcatttcggtctgaacggagcccagtgccaaaacattaaatgaaattcctttttctttatattcttccgccagtaattcggtcaaagtaattacagctcctttactggaactataagctgctaaacctgcaaatttcagacttcctcttacaccgcccatagaactgattgtgatcacatgacttccactttgaagataaggaagacaaatacgggttaagttggcaaccgcaaaaacattcactttataaatactttcaaaatcggactgagtggtttcagcaaaaggctttaacaacaatgcacctgcgttgtgaaccactgcgtccactctcttccaggaagacgaaagaaattgatctacttcttgtaaagctgcttcatcagacagatctactgacaaacaactaatgttttggtgctccaaaagtgtctgaggtgtttttctcgaaattgccaaaacctgatggcctgcattggcaaactgcaatgccaattcgtaaccaattccacgactggttccggtaacaataatatttttcataaagcaaaaataagcaaatcgaataaaaggacagaattatttattcatcgtaatttcttctgcaggtgtgattgcaattttggtcactgccggcagaaactcctgaataaaagaagtcatatgtggaatatccattactttaaattcgtctgaaacatggtggtaaaagtcgaagttttcgaagtcgaaagtacttatagactgacatggctttttgaaggcctcataaaaagaataattatcagatctataaaacagcttgtattctgcttcttttggtaaaaaaccaatagtctttttacccgtgtattcatttattttcacagccatattggttttatcaaaaccggtaatataggctaaataatcccgtttcataggtacaccaatcatttcgatattcaattgtgcgtataaattaaaattttgctttttaagtttttgcacgaggcttttagaacctaacagtcctttttcttctccggcaaaaaacacaacaagaatactgcgtttgttcgattttgtttcactaaaatactttgccatctctgcaactgctgtaactccggacgcatcatcattcgctccgttaaaaacaacgtctgcctgttgttttttctctaatccgatgtgatcgtaatgcgcactcaggaccacgaattcttttttcagcacaggatcggttccttctatcactcccacaatattataggctggtgttttaaagttggtcaatgtgtctttataagcagtaaaataaggtcccacatggttcttttttaaaaaattttctaaaaaagcggctgccttttcgataccttttgtacctgtttcacgaccttccatctcatcggaagacagttctttcagaaaatctgaaacttcagattcttttactttatagacaacttcaataggttttgaaacagctgttgaagatgtagtgtttactgtaacgggatttgatttacaggccagaaaaacaaaaggaagtagaaaataaagttttttcataaagaatgatttaattgtgcttcaggagctaaacctctaaagcagtcgatttaaaatattttttatacactttaaatacctgaatagtccctaaaaccataaaaaatacgggaataaaaacaggcatcacgtaccttgataatggattacttttttcaaaaatagtctgtaaaaccacaatcaggcttaacatcccaaaaaaaataccaatcaaagttcctgcaatataataatattttaactttttttctacgacaatatgctttccgttaagcaaatacagattccagctcgtccaaaaaggcagttgtaaaaaattgaaacaatttaaaatcattccgataacaaatggcgaataccctaaatactcccttaatttatcgtttgacttgtcggtttgatgaaacccataataaaagacaaaagccagaacaaacataaatccgatagcaaaaaaatcaattagcttcattaattttttattaccgattaattctctggcaaaaagcaaagtaaaataaatgacaaaactttctacaaaaatgactccgaacagaaagaaaaccaaattaaaaagtcctgattttgaataaatctccaaacccactacatttaaatatcctaatgggatcgatccgatgaagctcaccaaaaatccgattgaaatattctttaaccttttcattttttaaaaatttacaatcttactgttctgagtcaaatgcagtttgtattcccggattccaactttgtaattcagatatgggactccctttttatgattcgcagcactgatctcatacatataagtgatgtgtcttgccagttctttccaggcaaaccaaacagaatgtttcggatcgtaaatatgcgtgggttcactggctgccccgttaagttctacaacctgaaacttttctccgcgttctaattcttcgaaagtgttgtacataatatcaaaacgcccaaagtaaaattccggaacctctttagcaattttatcaatcattgcggttaactttggcgtgatccaatcgctcccatccaaaaattttgcgccacgagcatgattcccgaaaggaaccaaatttactctttcaccatatttcaaaacctgttgcaactgatctccgtattcctctcttaaaacatcaagctgtaattgaaatcttggcgttttacagattaacccttcaatcgttgagattccatcaccggtaacaattaaaaattctttcgaaacaattccggtaattttgccttctttttggtgtggatgacgcacgtaaaaaataccaacttcatttttaaatggaatcaaatcctgcaataagaaatcaaaatttgctttaccggcatattcactcaactcaaaaacatttcttatttttttcacaccggccccccttaaaccgatatcaggtttagcaattaaaggaaaataaattctgttttcgactattttttctacaatattatttagccccgtattctctttgatcaaaatagtattgggataacattctctgggaagcaaatcataaatttgttttttactttccattataaacccgccgttttttatcttcggattagacgcattaaagaagaatactgatcttgctttgatggcataataggcccaaaggaaataaataggaacgtacagcactttaaaaggccagtactcccaattggttactttatgaaaaaatagtttcatctttactacattaaatacttataaaagaagtcgagaactcctttgttttaattaaatcgtaatacttcatagtacctttattctgcttgattacaacctgagtgatgctaagtgttttcaaaacattttctctattaatgaccaatccgttttcagaatcatcattctgagtgtttttatgaaaatctaacatatcggtagagaagatttcatccttaccttctaaaaattcaaaaaaccaattggagcgtttctttctaatctccggaggatacaaagtaaccgatgaccagatgtgattctttgaactctccaacaatgtcttaatttttaccagaccatcccaaatcagttcgtacaattcttcattctgatacaaaaccaatgtaaacggttcgatatcttccagattaatttcatcccaaaaatccttgggcgacaaactcgaaatcatatcgagagcaatcagtcccctgctttttctatacaaaaatgaaatcctatgcttctctgtacctccattcaaaagtaccagcacagttccgtttttatctacggcaaaccacgtccctcccgcttttgaatcttttgggtacataatagttttaccgctctgacaatagtttctgggtgcaatggcttccggacgaattactttttcatcccgatttgaagtaatcattaccactccgttatggttgacgaaacttactgtacacattgttttctgtattctatagtggaacgggccacaccaaaattctcatgaatcaaaacatctttaaacggcataacggccactttgatcaaagcctgatggtggatacaatgctccagattgtataacaattctctgtaataattgctttgaattcgaagggcaagcccatctattacctgttctaaataaatggttttgttctcacttttcaaatctgcttttattcccgctataagttcttttgcataagcagtttccgtttgcattcgaatatttctctcgcggttatcgtaatttacaactcctgaattgtaacccttttccagacctataaacatttccagaatgtgtcgcaaatgctcgccaattgttgcattatggagagcagggcatggtcttgcataatctgcatctgtcaattgacctaacagatcatcgagttcatctaaactgtggcgtattgattttagtaacatggctattttaaatttagaagattaaacaatttacttttattgaaataaagtaatcctaaacaacataataaggtgataagggccagtaaaaaaagtaagcctccatcattctgaactgaaattcccaaaacaaataaatgagatagtatagcacccgccatcactccacatccgcccaaagctccaatccatgttgtttttggaattaaaattaaaatcgcaacaaccaattcggctattcctgatccaattcttccgtatggttcaattcctaaagtcgaaaaaatataaatactttcttctgctccgctgaatttaaaaaacaaggtttgcaacaaaattccagccgctataatccttaaagcccagattattttttctgatttttccatcttgttacctgtttatttttttccagttctcgtcggcctgcgttttcagattggtctgatttttattccagcttttcaaagtattattaaaataggcattgtaaaacaaatagagtttaccgtcgataattttaaacgtttccggatttatttccactttatctccggaacttcccagagcataggcacaccagcctccgtattgcggttcatattttgagggatttttaaaaaattcctgtttattttcgtttgaagaaaatttataaatccccccctgataagaagctgataattcattcttccctttaatcgcttttcccggactaaaataggccacaggatcgtagccctgaatcgctactttattttccagattgtactgacttaatcttttcgcatcattctgagcaaatgaaatacccgaaaccaaaatcaatacaaaaaataacagctttttcatcttgttttattttaggttttttaatactgaaacgagtaattcagtcgaaatgcgatgcttaaaatcaggagcaatgtactcgaatgcaatctcaccatttggattcacaacaaaaactgacggaacgggtaagaaacttttattgactcctttagaatgtacgttaattactgatttatagttttcaggagcttcataagcaattccaatcgctttggtaaattctccttcagaatcagaaagcaaagtatattttactttatctttttcttctgtaatttttaaattctccggagcatcaggacttattgcaataatctgatatccaagatccagaatttgtttctctgcttcagctaacgcctgcaggtgcatattacaataagggcaccagccaccgcgatagaaaactaaaatcgtttttttcttttcaagcaaatcagagatttttactgctgcattttcaactgattttaatgtggtatttggaattttctctcctattaataaaggagcaatatcggtcgccattttaggaagcgaactttgtgcagtagcaacagtacataaggctactaaagcaataaaaaatacttttttcataatttttacttttacatcttaatttgataatgtaaaattacggtggtatgaaaaaggcaaatgtcggctaatttacacttagcctaaaataatttagattttggtaatatcaacaataacaatctcttttctattgtaatgtatcagttcattcgtttccatctcgttcaacaattgggttgccgtttgtcttgaagtacaaataatttgtgcaatatcattctgtgtcaaatagttttccatcgttaccgaattcccttccgctactccttccttatcggcccagtctttaagaaactgatacaatctggttttggcatctttagaaactaaattggcataactgtttttaatccgtttcattttcaaaccgacaaatttggtatacgaaagtgcgagcgttggatttctcaacaataaatcttcaaaatctgacatcaggaaactacaaatcgcaacatcctccgaaagtacttttgcatattcttcatttttggcatccgtttccaaagtcagttctccaaataaatctcctttctgaatgatgtcttttatggtttcattaccttcttcatcgatcgatacgattttaatatttccttttttgagtaaaaaaatgcggggtaaatctgaagtagaaaagtaaataatctctccttttgacgcttttttaaaacctgtgataatacacaattgcttgatctgcgagtaactcaaagttcgaaacaatttgtggtcccgcaaataccagtattttaaatcttcgtacataaaaaagtttatttctgtaaatataacgaaattaaaatccaaacaaaaaccctttcagacatcgaagagtctgaaagggtttggattatcaaagtttcgaagagatttatcctgcaataacagctcttgaaattacaattttctgaatttctgaagttccttcgtaaatctgagtaatttttgcatcacgcattaaacgctctacatggtactcttttacgtaaccgttacctccatgaatctgaaccgcttcaacagcggtatccattgctacttgcgatgcaaacaatttcgccatcgcaccacttacatcataatttttatgttggtctttatcccaagctgctttcatacacaaatgacgtgctgcttcaatattaaccgccatatctgccaatttaaaagcaatggcctggtggttgcaaatttcagttccaaaagctttacgctctttagaatattttaaagccagttcataagctcctgaagcaattcctaaagcctgagaagcaattccgatacgccctccggcaagcgttttcatggcaaatttaaatccgaaaccgtcttctccgattctgttttctttaggaacttttacatcactaaacattaaagagtgtgtatcagaaccacggattcccattttttgttcttttggcccaatagaaaagcccggcatgtctttcgtcatgatcaaagcgttgattcctttgtgtcttttctccggatccgtttgtgcaatcactaaataaacagatgctgtatttccgttggtaatccagtttttcgttccgtttaccaaatagtgatctcccatatcaaccgcagttgttttttgtgaagtagcatcactacccgcctcaggctcactcaaacaaaatgctccgtgaatctctcctgatgctaaacctggtaaatacttttgtttttgttcttcagttccaaattcctgcagtccccaacaaactaatgagttgtttacagacatcactacagaagctgatgcatctacttttgaaatttcttccatcgcaattacataagaaatggcatccagtccgcttcctccatatttaggatcaaccatcattcccaggaatcctaattgccccattttttttatttgttctgtcggaaaaatttgtttttcgtcacgttcaataactcccggcagcaattcgttttgagcaaaatctcttgcagcttgttgaatcattaaatgttcttcggtaagattaaaatccatagttatcctgttttatttttctcagcttaacccgatttaaaatatcgaaattaagatgacggttatttttgttttgtttttttgaattgctcttttctgtaaaaaggcttccaaagataaattttaaaagtgagtttaacaatgcgcgcatataaatttactagatcggcaataattacgataacgttttcgttataatcttaaaaatttagcgtaacacgcatcaaatttgcaatcattactctaaaaaacaagaataaaatacacgatcaaaaaagtccgattctaaagttttagtaaagtttagttttttcaaaagattaaacaattcttaaaatatacggtttcccgtaaaacaactcttactaatttgattactaatcttatacaaacaaaaaaagcaaaattgagtcaaaaaaaacatatttaagaacgctataaaattgataaattaacattatttttgctcaataattataatttccataaaacatgaaaaaaagtttacttctacttacattcctttttagtatacaattctcaaccgtttcagcccagactcagcttgatgtgaatggcgtaacagttccaagaaaaattgaatttcaaggcaaaactttacagcttaatggtgctggaggccgatcaaaaatgtggttggaagtttatgttcaggccttatatttatcgcagctaagtcaggatccacaatttattattgacagcgataccgaaatggcaatccgaattgaaattacttcttcaatggtttcttcaagtaaactgaccaaagcgatgaatgccggtttcgaaaaatctacgggaagcaatcttacgcaattacgtccccgaatcgaagaatttaaaacttttttaagtgacatgattactgaaaaagatgtatttgttcttgcttataatccgcttgatcaaacagtcaatgtttacaaaaatgaagttttgaaaggaaaaattcctggatttgatttcaaaaaagcattattcggaatctggctttcagacaaacccgttgatgagacattaaaaaaacacttattaggaatctaatttgttagatttataaaattcaaaagccgaaaacgtattgttttcggctttcttttttctcttcgataaaaatttgacacgagatacattattcgcattattctattttatacttttacgcaaactaaacatatctcaacaaaatgaaagatttattacagcaatttgaaaataaagcacctgaaattgtttttaactggaaagattccgaaacagaagccgaaggatggactgttatcaactcactgcgcggtggagctgcgggtggaggaacaagaatgagaaaaggcttagatatgaatgaagttttatcgttggccaaaaccatggaagttaaattttctgtttcaggaccagccattggaggtgccaaatcaggaataaattttgacccaaatgatccacgtaaaaaaggagtattacaacgttggtacaaagccgtttcacctttattaaaaagttactacggaactgggggagatttaaatgtagatgaaattcacgaagtaattccaatgaccgaagaatgtggtgtatggcatccgcaggaaggtgttttcaacggacacttcaaacctaccgaagcagataaaattaatagaatcggacaattgcgtcagggtgttatcaaagtaatcgaaaacccaaagttctctcctgatgtaacccgaaaatatacggttgccgacatgattaccggttatggtgttgccgaagcagctcgtcatttctatgccacttacggtggagacatcaaaggtaaaaaagcaattgtacagggatttggaaatgtcggttcagctgccgctttctatttggccgaaatgggtgctaaagtaatcggaattattgaccgcgatggaggattaataaaagaagacggtttttcatttgaagaaatcagaactttgtttttaaataaagacggaaacaaattagttgccgataacatgatcccatttgacgaaatcaacactaaaatctggacgattggtgccgaaatcttcaccccttgcgcggcttcaagattggtaactcaggagcaaatcgacaacttaatcgcaaatggattagaagttatttcatgtggagcaaatgttccttttgctgataaagaaattttcttcggttcgatcatggaagaagtggatcgcaaagtaagtttgattcctgattttatttcaaactgtggaatggcaagagtttttgcttatttcatggagaaaaaagttcagatgacggacgaagatattttcaatgatacttcagaaattataaaaaatgcgattgttaaagctcacactttaaatccatccaaaacaaatatcagtgcaactgcttttgaaattgcattgaaacaactagtataatttttttatactttatcaaaacgggccggatgaacatctggcctttttttatgtttcatgctaattcagctgatcctttttgattccgcttccccattaattacaaaatctgtgcaaatcggcaaaatctgcctgcaaaaaacattcagtcacaaaatcccctcctcttctattctaaacaatttttactacttttaagcgttttttaattaatacaatttcaaaattcagaataaaaatgagttccatttcttcagatcaaaagaaatccttactactcactactgttatttatgcagtactcattgcgttgttatttttcatacgcttttggcctccttacaatccggagaacaatgtggctttggcttccggcggaggtggcggaggtgttacggtaaattttggagacagcgatttaggctcgggagcaaattataaaagcgaagttataaatgtaaaaaacgaagcccgacaaactccggcaaaagcaacaccagacgaagcaattttaactcaggaaaataccacaaccgacgaaagtgttgcaattccaacaaaagaaaaaccaaaaaaagcaacacccgttgtaaaaccggaagcgaaaccgattcctgagaaaccaaaagtttccaattctacaaacgatgccttatcaagtatcttaaaaggatccaataaaggcggggatggtgatgataaagcagctggaaacaaaggaaaagcgaacggcagtctaagttcgaacggatattatggaacgggaggttccggaggaggaactggcggtggcaacggaaccggcaatggaattggtaacggaagcggttatggcccaggaagtggcggcggttccggtggaggatctggatattcgttaaacggacgcaaagcactgtctaaaccggcaccaaaatatacctgcaatgaagaaggaaaagtagtggtagaagttaccgtagaccaaaatggcaaaaccattagcgcaactgcaggaataaaaggaacaactaataccgcaagctgtttactggaacaggcaaaaatagcggcattgaacacaaaatggtcagcagacgacaaagcagctgcaaaacaggttggaaaaataatttacaatttcagtctggattaaacacaaattatacagatttacataaatctgtttccataaaaaaggctttcaggaaattctgaaagccttttttattttcatcaagtagtttattcttttttccgtcgccccaagagaacaaaactgtgtgtttgtcttacttcggactggtggcaattacaaactttaaattattcttcactccgatttgcaacacatcaactaaatcctgaacctgaagattaaacggaattcgaaccactacagtttgctgcttgtcggctccaattttcgacattagagtggtttccaatgcatcaaattcaacaggcactttgtcgatatagaactttttatcttcggtaacagacaaactaattaattgtttatttgttttttcattggctttggctttcggtaatgtcattttaatcacattaggattcgcaagtgttgatataataaggaaaaacaacaacaggaaaaacataatatcacttaatgacgatgtcgccacttcagcatgaaaccttctttttctcttgatagacataccttatgctctttgaattatattgacaaattctaatatttgtttctgaatcttcaacgcaaaatcatcaatttttccattcagtaaatgataagcactataggcaataatccccacaattaatccggaacccgagctgatcattttctcatacaatcctcccgaaatatttccgatactgatattttcagtaaccgaaatactgtagaaaatcttaattacacccgaaatagttccaataaaaccaagcgtaggtgcaattccggcaataagtcccagatgccccaaatttctttccatttcaccaatttcaatatcagcggcacggtccatgtttgattcaatctcagcaattggccttccaataaccagcacaccttctttcagaatatttcctgctgccgtatcgcttctttctacaatagtcctggctaattcaatatttccggcatttaatttatctcccacatcctgtatcaatcgcgaatcgattcttgatgcttttttgatatataagtaacgttcaaaaatgatataaatagtataaaataataacagtgcaatcggaattaagaaaactccccctttcataataaacccaaacattgaaatttcattttcaggtgcaatcttttcgataactacgtttgaggcatttgcgatggtatcagcttgtaattgaatgtagctaaacatatattaattcttgtttttaataattaattctaaaaaatatttgaaatttgcaataaagataattttcactcccttataaaactaaaaaaaatgaaaattatttcaattcgaaactattttaactcaattcaatgaactatcaggaaaccacaaactggatgtttaatcagcttccaatgtaccaacttcagggagcttcggcatacaaagaagatttgactaatattaagttgctggccgcacatcttggcaaccctcaagatcagttaaaatgcatccacgttgccggaaccaatggtaaaggatcgacctcgcacatgctggcttcagttttacaggaagccggatataaagtaggattgtatacctctccgcaccttaaagattttagagaacgaattaaaattaatggacaggaaatctccgaagattttgtttgtcaattcgtagccaaacacaaaaacttttttgaagccaatgatatgagttttttcgaaatgtctgttggactagccttcgattacttcgcttcagagaaaactgacattgctattatcgaagttggtcttggcggaagactcgatgcgaccaacataatcacaccattagcatccgttattaccaacatcgatttagaccatactcagtttttaggaaataccccggcagcaattgcgggtgaaaaagccggaatcataaaaccaaatgttcctgttgtcattggagaatacacctttgaaactcaacccgtattcttagccaaagcaaaagaaaatgaagctcctatttattttgcttccgatttaatcacagaagtttttccttccgatctaattggcgattatcagtttcacaataaaaaaacggtacagcaaaccatccaaatattagattctcaaaatgagtttaaaatctcagacgaaaatctaaaaaacggtttattacaggttgtaaaaaataccggtttacaaggcagatggcagcaattgggagaaaacccaaagatcatctgtgatactgcccacaaccagcacggactggctgttgtaatcaaacaaatccaaaaagaaagtttcgaaaatttacatattgtgctgggagttgtaaacgacaaagatctcgattctattttacctctttttcctaaaaatgcacaatactatttttgcagtccaaattcgtccaggggtctaaagactgaaattttaaatgaagccgctaaaaagcaccatttaataggggaaaattatgactcagtagaacatgcttatgtcgcagccagaaaaaatgcttcaaaaaatgatttcatttacgttggaggaagcacttttgtagtcgctgaattgcctcttgcctaaacaaaagttcttagactaaaaaaactgcaaaaaaccaatttaataacaaattcataaacagcgagatacaaaaccttttcaaaaaagttttattttttattcgattttctttgcagaactcaaaaactagcgtatatttgcactcgcaatcacgaaggatagcgacctaataaaatagggcgattagctcagctggttcagagcacctcgtttacaccgagggggtcggggggagtgagcaatatagattttttcttgttcagattatctaatctttttgcttaatccccaacttttgaacctgatcccttaaaggataaagttacttaccaatattaggttgcaacttttgaacctgatcctttttcttgttcagattatctaatctttttgcttaatccccaacttttgaacctgatcccataaacacattcaggggattaggtactttttaaagtatagagaaaacactatagttgtaaaacaacaaaaccctcaacaatgttgagagttttgtcttctgtggagaaagagggattcgaacccccggacctgttacagtcaacagttttcaagactgccgcattcgaccgctctgccatttctccagtatgttgcgatcatttgctgattgcgagtgcaaatataagatgctttttcggttctcaaaactttttcagcgcttttttttaagcttttttgaaataattttcaagtatctaattatcagtatttacgaaaaatagatttttgaaaaaattagttcaggtcgtccaaaataggcaccggttttttgttttcatccaccgcaacaaacgaaaatgttccagaaactacggtttcgcgaagctcggaatacatttgctccataaaaatatcgacgtgaattttacaactcgttcttccaacactgatcactttggctactaattcgattaaagttcccgccggaatggcttttttaaaatcgatttgaccggttgaaatcgttactactttttttctgctgaatcttgtagcacaaataaaagcaacttcgtccataacatgaagcgctgttcctccaaataaagtgtcgtaatggtttgtggtactcgggaaaaccgctttgaaaattcgtgtttccgattttataattctttcttctactgttcccatatattaataacttacgtattcggtaatttcaagtccatatccaatcattcccacacgttttgtttgttccgtgttagaaaccaatctgatttttgaaatgtcgatatcgtgtaaaatttgcgcaccaattccataatctttgctgtcaatgattacttttggagctttcattgttcctcctgcctgtaaggttttaagttcggcaattctgttcaatagatttacagccgtcatatcctgattaacgaataacacggctcctttgccattttcattaatcaccttgaacatatcgtctaattgctgttcagcattattggtcaaagtgccaagtaaatcattgtttacctgcgaagaattgattcttgttaaaatagcctctcccagattccaggttccttttgttaaggcaatatgaatttgcttgttggtagtttgctcgtatgctcttaatctaaaagttccaaaacgggtttcaatatcaaaatcctcttttttaacaatcagactgtcatgttgcattctgtaagctaccagatcttcaatcgaaactaattttagattgaattttttagccacttttgccaattcaggtaaacgagacatggtaccgtcttcattcaaaatttcgcaaataacaccagctggtttaaatcctgctaatctggcaaaatctatagcggcttctgtgtgtccggttcttcttaaaactccgccttgtttggctactaaagggaaaatatgtcccggacgtgccaattcatgtggtttaacatttgaatcggtcagtgctattaccgttttagagcggtcagctgccgaaattcctgttgttaccccatgtccttttaaatctacagaaaccgtaaaagcagttttcatatgatcggtattgttggttaccattggtcttaggtccaattccttacaacggctttctgtcaatggagcacaaattaatccgcgtccgtgagtagccatgaaattgatcatttccggagttactttttcggctgcagccagaaaatcgccttcattttcgcgatcttcatcatccactacaatgattactttaccctgacgaatgtcttcaatagcttcctcaatggtgtttagttgtatttttgttgttgacatagttatttttgattttgagcaggaaaaaaccgctcggaaattttttgaaatagttgtgagattggagtagtaattgcatcaaagttgattaatccgttgtcgttagtagcacgatacgttaataatacagctaatggtgatagtataaaagaggacatccatgatcctaaaaacggattcattgcaccttcctgtgaaagtctttttccgaaagtattaatgaaatggaatgtaataaaaattaaaacggcaaatacaataggcagaccaagtcctcctttgcgaatgatagctcctaatggtgcaccaataaaaaacattaagaaacaggcaaaagcgattacaaatttttcgtataaggctgttaaatgttgattgatatctctttgtttttcttttaaatcgttttgtgttgattcgatagaatagatattgcttgtaacattgctgcttgccattcttattacatcagccttctctttattcgtgtaaagtgataaaaggttgttaggcagattctttttctttttatttgtttttacaggaacggatgatttggtaatacccacacgctgattgatattttctgaaaaagagatgatttcattatccagatttttgttcagggaatccagtgtataacgaagttcgttaatattcaacattccgtttgtgttgcttatgttttctttatcgtcggcggttttgtttaattcggataaatcaatattaatgatctgttttttgaaagcactttttatgaaaggcagtttcgcgcgatcttcgtattttttcggagtaacgtcctggtagtaatatccgtcatttaaaactaattttaaaatactggatttttcgttactcatcaattcaccatctttggctttgataacggttttgttttcgccggtattggttggtttttcgtgaatcgtaacaccggttaaaatgtttccattttcaccagattttttgttgactttaatgttgtaaaacccaacgtcattaaactgcccttcggcaattgccatggcaggcttagcttgtgctatgttttttcggaaattaataaatttatattccgcatacggaatcacattattggcgaaccagaaagcgacaatgcttaaaacaaagataaacacgattaaacctcgcatcgctctctgaagtgatattcctgatgatttcatcgctgcgaattcataattctcagccagatttccgaaagtcataatagaggccagtaaaaccgatagcggtaaaaccagcggaatgattctcggcatcgagaataaaaggaatttcacaaccaaaatcaaatcaagatctttacctgcaagttcggagataaagagccatacggtttggagtatgaagataaaaaaaaggattacaaataccgtagtaaatgtaatcaggaatgttttgagtaagtatttgtctaaaattttcaaccttgtaattaatctaatttattgatgtagtattttggatatttgctcgctacaaatgtaaattgattttttgataaaggctgattggttttaaaagaattaacggttaaagtggtttttgttccattttttccggtttcgatcaggttataaatgtgtttggtctgaacatcaatacctaaaagaatctcttttctttggtctttagaacttgtaggagctaatttgatatattgtatttttctaccttttacattttgaacaatatccatgttgtatttgtagccggaattgaagaaagtcagcatctttgaaggtgtaatagcagtatcgtccttttcgtttactttagaaatggttacttcttcgtcttccggaacgatggtgtaggttttctgaccgtcaaatatttttgttactcccataaaattcaatacatattgattgcctttcatggttacatttcctttactgtcctggttgatgttctctttagcgttattcagtgtgtatttaaagtcaataacaatattgttgtagctttttatttttgaagttacttcattcaataaatctttggcttttttatcctgagcctgaatagaagtgaagctcaaaagcaataaaaccgccatttgaatgcactttttagtcatcttagtaatagaattgttttggatttcctgaatttttgttttcatgatgggattaattttgttcattattaaaaaattggtcaagagcacttaagtcagtgatgtttacggttcttgctttactgccttcaaacggaccaacaatgcctgctgcttccagctgatcgatcaggcgaccggctctgttgtatcctaattttaattttctttgcagtaatgaagccgaaccttgttgtgcattgacaataatctctgcagcttctctgaataaagtatctctttcggaaatatccacatcaagattgatgccattttcttctccaacaaactccggaagcaaataagctgtggcataagctttttgcgaaccgataaaatccgtaattttttccacctcaggagtgtctatgaaggcgcattgtacacgtatcacatcatttccgttggtgtataataaatctcctcgtccaattaactgatcggctccctgtgtgtccagaatggttcgggaatcaattttagaagttaccctgaaagcaattcttgcggggaaattggctttaattaaacctgtaataacattcaccgatggtctttgtgtagcgataatcaggtgaataccaatagcacgggccaattgagccaaacgggcaatagggacttcaacttctttaccggcggtcataattaaatcggcaaactcgtcgactaccagaacaatgtaaggtaaaaatcggtgccctgcctcgggatttagttttcttgctcggaatttttcgttatattccttgatgttacgtaccatcgcgtcttttagtaaagagtagcgattgtccatttcaacacaaagtgagttcagtgtatttactacttttgcgttgtcggtgatgatagcgtcttctgtatcaggtagtttggctaaataatgtctttcgattttattgaaaagcgtaagctctacttttttcggatctaccagtacaaatttaacttcggccggatgtttcttgtataaaagagaggttaaaacagcatttaaacctaccgattttccttgtccggttgctccggccatcagtaagtgaggcattttggccagatcgaccacgaaagtttcgttggagattgtttttcctaaagcaattggcagttccatttcagcttcctgaaatttagcagatccaataacgcttttcatcgaaaccattgtagggtttttgttcggaacctcgataccaatagttccttttcctggaataggagctataatacggattcctaatgctgaaagtgataatgcgatatcatcctctaaacttttaattttagaaattctgatcccggcttccggtacaatttcgtataaggttaccgatggtccaacagttgctttgatctgtgcaatttcaattttataattgcgaagtgtatcaacaattctgtttttgttttcttctaattcctcctgattgatcgtaattcctccggttgagtattctttcaatatgtcaagtgtagggaatttgtaattggataggtctaaagtagggtcgaataaaccaaaatcggctactagacgggaagccagattctcttcaataatatcttcctcttctgctttttcaattacaaattcttcggtatgaacaggagtttttacagttaccggattgatatccatttgaactggttttaaaaccggattcaaatcaatttctgaggcgtttgaaatggttggttttaaagcttctttgttgatttcgaattggctgatattagattttagatgaatgttgtctaattccggatcttcttcctcaatagcaaattcttctaagttataagcactctcggcttcctgaggtttttttattgaagccaattctgaattgaattcttttttagtagaatcaaaatacgactgaattttttcaggagatagtttgattttaaaaatcaggtacacgattaatccgaaaagtagcgtaagtaaagttccggtttttccgatataatcttgtaaaaacagattgagttcatatccgatcgttccgcccaattcaggtgctgaagtggcgaaaaatccaaatagtacagagacaataataagggcaaaaagatcccaaaaccaagtattttttaattttttggtagagagttccaaagcgagaaacattccggtaaggaaaaataaacgaacgaatataaatgaagcaataccaaagcctttgtatacaataagatcggcgaggaatgccccgaattttccgagccagttttctacaatttcggtacgatcgccaagctggcttaccgcactttggtcagattgccattgtccgttgacataaaaagaaataaaggcaactaatagtgccgcagaaaagagtatcagaagacatcctaaaacaaatttttgttgtttggataggtttccgtactttatcttttcagtctttgattcgttttttttgtctaaagtttcctttttggttgtttttgccattcttgcgtttcctgttgcctatataaattttgggatgtaaatgattaagcctattgcgattgctgtcattgcggcaaaaaataccgctcccgctgcaatatctttaataaaaccgattcgtttgctgtaatcagggtgaataaaatcggcaattttttctactgccgtattcaaaccttcaacgcttaaaacgaggcctatggctaatgtttggcacaaccattcggtttgtgaaatatgaaaataaaacccggctatggtcatgataattcccagagagaattgaaccataatgctgtgttctgttttgattaattttaccgctccgttaaaagcataggtcatactttttagacggccggtaacaaaggtattgtctttttgaaattccatttaaagatattataatgctgctaaagctgcttcgtaatttggttcgtttgcaatttcagctacttgttcagtgtgagttacttttccattagcatcaactacaatgattactcttgaatgtaaaccagccaaaggtccgtcaacaatttctaaaccgtttgtttttccaaaatctcctgcctgaaaatcggataagttaactacattttctaatccttcagcaccacaaaaacgtttttgtgcaaatggtaaatctcttgaaatacacaatacagttgtgttctctaagttgctggcactttcattgaattttctaacagatgtagcacaagttccggtatcgatacttgggaaaatgtttaaaaccagtttttttccggcaaaattgcttaaagaaacaactgataaatcgttttgtactaatttgaaatcagctagttgtgatccaactgttggtaattcgcctgaagtatgaataggatttcctcccaatgttattgaagccatgatttttatttaaattaatgaggttcaaaagtaaggattaatattcgaatctaaaagtatttgttgatgggtttaaggagagattaagggggctgttttaatagtcacgtattcacaaattattttagatttatcacaaaggatgtcatttcggcgaaggagaaatcgcactagagaggtatttttgattctggagttttttctgtgatctgcttcgcctattcgctatcgcttgggtttccttcgacttcgctcaggaagacaccattggttcagagtgcgagtgtgacatgatatgagtttttcgtttattgatctgattggtgaagaagaccttttgtagtatgaaagtccttcgacttcgctcaggaggacactcgtggtttaaaccgagagtgtgactgcaaactgagactgcaaactgagactgcaaactgagactgcaaactgagactgaaaactgagactgaaaactaaaaaaaaaagcgcctcaaaattgaaacgctttctcttgtcatgttttttttatttgtatgctcgattatttatcgatggaacctaaaacacgtttcatgaacgcatttagagcttcttttttatcagtgccctgaactaccattttgtgtacttcaagcgcaccatacatattcgaaattaattcgccaattacatctaattcttcatcttttaaagacggaatttcagtcatcgcttctaaaacttcgatagtttcaatgatataatcctgatcgttttcttcgatgaattgggttaactgctttattacgggtaatttcataattagatttcttagattttagacattcttagacttcttagactttcttgaaaatttagacatcatctaaggagtctaaagatctaagcaagtctaaccaatctcattacgcgatcgcgtttaccaagtcgattaaaacttcttgtttgttggtttgagtttctccaaccaattgtccgtttacaaaggttgcgaacgtaggcaggttgcttacattggctaactttcttgattccggtgaattttcagcatcaaccaaaacaaaagtgatagcttcgttttctgtggctagttttttgaattttggtttcataatacggcaatttccacaccatgaagctgaatattgcactactactttttcatttttagcaactaaatctgctaacgtatcttcgtttaagtcgattaacatagtttttatttttaagacactaagttgttaaggttctaagatgctaaatttttgctctcgaaccgaataactttgtgtggatttatttgatagttttttaagtcgttgagattctaagatctaagtttaatcttagaatctcttgacttttattgtagaactataggtaagattcaaaagttaagttaaaaaacttagcatcttagaaccttagtatctttgctgcttaattagcgcttaaatactcagcagtactaagtctgtctgcgctcattgcttcttttccggcttcccagtttgcaggacaaacttcacctttagtttgaatgtgagtgtaagcatcaaccattcttaaatattcgtttacgttacgtcctaatggcatatcgttaacactttcgtggaagatttttccagtttcgtcaattaagtaagtagctctgtaaggtacgtttgaaccttcgatgataactgaatcagtttcttcgctgtagcttgtagcttcgatgtcaagaatacctaaaatattagctaagttacggtttgtatctgctaagattgggtaagtaacaccttcgattccaccgttattttttggtgtgtttaaccatgcaaagtgtacttcgtttgtatcacatgaagctccgattacgatagtatttcttttttcaaattctggtaaagcagcttggaaggcgtgtaattcagttgggcaaacaaaagtgaaatcttttgggtaccaaaacaataatacttttttgttgttgtttactgcttcttcaaaaatgttgatttttaaattatcacccatttcagagatagcatcaactgcaatacttgggaatttttttcctactaaagacatatttttcgttttaaagttaaaaatttatttctggtgcaaaagtagggcataagtgcgtattcttacaataagaagtaattattaatatttattaggtgatagtttttgattataagttactgtttggtttttgtaagttattggatttcaatatttacgggtaggtttcctctgcaagtattattttcaagaaattgaattcctgcatttttttgaaattcttcgaaatcctgatacacctgaataattcgggaagctttagaaagattcggaattattggcaaaacataaggatttccgaaaacgtaaaggaggcactttttggtttgaagaaggttagaaagcaattctaaaacttcatcattgatttcgaaattattcattggttttgctttcggaacaaacaaagaaataataacggtttcgaatggctccagaccttttttgatttctgaaatggatgaatcttctgcattctcaaaatcaaattctgctgaatttagtacggtatttaaagtctgaaaaaatggatttttcgtgtttttgtataaacttaatttggctaactggttgtttttttgtgcttcaaaaacctgttcgatggtgaaatcatcaatgatttttgtgatggaattttgagcaatttcaaggtttaaagctgatgctctttcgaaatttagttcacctgaagtaaattgattttcagctagaattccaactttttgcttggctttgataattctgttgaaactttcttcaatacgttcaggagaagcatttttaagaatggcttcgattccttcgggtacattttcggcgaaacataaaacatcattacccgcattgaaggcttcccattccaattctcctttggtttcgtataatttagaaacactatgcatgttcagtgcatcggaaatgaccagaccatcgtaacccagtttttctcgtaaaagtgtttcaataataggttttgataaagttgccgaagtattttttccttcgttcaaacttggaactgctaaatgcccaatcataatcgaatcgacattgtgttcaattcctttaataaaagggtacagctcgttttcaagtaattcttttaaagtctcgcttaaaaccggtaaccctaaatgtgaatcgacattggtatttccgtgtccggggaagtgtttcagacagcctaaaattcccacttccgacatgcctttaaggtattctacagcaaaatgggctactttttctttgttttcaccaaaagagcgatagcctattacggggttgttcgggttgttattgatgtcggccaagggagatagattgtaatgaattcctgcagctttcaaatctaaaccaatttgtttccccacttcataaaccagattcgatttattttccggtaaggcgcctaatgtaatggcgtatgggtactgcggtgttttttcaatgcgcatggctaagccccattcggcatcaatgctgattaggagaggggtagtggctgcgttttgataacggacaatcaggtcttttattttttgatagctgtcgtcattaaaaacaacttttttcttgctctcgtagtttgttgcagcactcgcacggctgtgaaaaaaggtaagtccgccaatgtggtgttcttttattaaacgttcagtttcctggatgttttcttcggtatcgtttataaaaactgcaggaaaaaagaattgtcccactttttgtcttaatgcttgtgctgtcattttcattagtataaaacccgttgggttgtaattcgtaaaagtttaattaaacagatagtcccgatgcatcgggatatgtgtaaaaaaggatacaaaaaaaaatataatttctttcacataaccagttttgtgtgttttaaataagtgaaacgccttttttgaagtaaaaaaatctatgtttctatgtgttaaaaatgattacacccaaaagattattttaaagtcattttcatacaaacactattgtccattttctcgtaaggcggatagtttggaatgatagtgtaacctaatttttgatataagctgatggcttccggctgatttttaccggtttcgagaatcgtattgctgtatttgatttcttttgcccagcgctcgagttctgccaaaacctgagaagcaattcctctttttcggaaatcggggtggacaaacatgcgtttgatttcgaccgtatctttttctttttccctgaaagcaccacaaccaactgctatatcattttcatagaaaacgacaacatgtttgatgagatcggttttgttaaactgattgtaaaagtcatggtcttctccgtctctgatttttaaatcctgatccagtaaaacgaccagatttttaaaatcagtatcgtcagagttggttctttttaaactaatcatgatgttaaatttattttcgtttttgaaaaaaggcgctttacaatatggtgttttggctaagctgaaatttatttttcaggattaaaaagtttgcattttcataaaaatgctcttttaaagctgctttttattcataacctttccccgtaaaccaatcataaccctcaattgttttatattcattaggcattgaactcagtatcacggtctcttttttattattgttataaggtttgttttttgagataattaatttaccggttttcttgtcgtttttgtctttttcatagtagacatattccagagtgtcaattgtctcgccattccatctgtatttgtacatctcagtttctccgggatgaccatattgtacacctcttattattttttctttaggagagaaagttggattgataaattcaaaactatttgaaaaagtcttttggtcttctctgagtaagtaaatattactgaaagcttttaagcagcacccggtagcaccataccagtttaaaacgaagtcttttaatccatctccattaatatctctaatagtgtcatttctataagtcagactccattctttatgagagaccacctttttaaatttattgttaacttttgaatagatgtcaatgtatacatcgtttattccgtaacggtgaataattaaatggggatgctttttggtgaaatgattatcgaaatttatatccacttcaattgcagtgttcactttatattcttggtgaaatttgttcttgtcaatattttgtgttgcaatttttattgcatttgttaagatctggtcaaatcttacactatcaattctattttgctgttctaatttttttcttttttctaaacgttctttttccttttgtaaaaacgttgccgaaaccgaatcttttctaactccagatttctttttcttttcgtttgattgtccgcatgaaaataataagagtatgattactactattgctaatatgtttggttttgtcttcatacggttgcgaaaacttagaaaatgataatttgttcttatttcagtttgcttttcttttgtttggcaagttgtgttttggtgtgtaatgctttttctaagcggtttttgaaacggaagagtttcggcaaaccttcgagtcggtcttcgagtgtaattttttcaaaaacaacaatggctttttctaaaacccggatctcattatcgagatccatctggtttttatagaaggttgctaatcggtcgtaaggatgatttcctttaaaaccttcgttgatattttgttcgtataacgcaattgctttctccgtttctcctgctttttccaattcaattgctttcaggtttcgttcggcctgtaaattttcattgatctccataggtaagatgtttgatttggggttaaacttcttcagattttttcccaaaatctttcgggaaaattaaaaaacgtgataaaataagacctgggattgtggcgattactacccagataaagaagttttcataacctaaatatttttgtataaagccacttaacatccccggaagcatcattcctaatgccataaaaccggttgcaagcgcataatgtgccgtttttgattctccttctgcaacatgaattaaatacatcataaaacctgtgaaaccaaaaccgtatccaaattgttctagaataacggtaatgcaggtatacagatttaaaggagagttaatttcgaaaaaatacaaattgatatgaagatggaaaatatcttgcggctgaaaatgagccaatccgataaaaccaagaatagggagatgcatggtcaaaaacattggaaacatccatttggtaagaccatgtttagaaagcgcgattccgcctaaaattcctccaacagtcaaagcaaaaatccccagagttccataaattattccaacagcttccgtatctaatcccattccgcctaattcttttccgtccaataaaaaaggacttaacattttaagtaattgagattcaccaagtctgaaaactaggataaaagcgagaattattccaatttgttttttttgaaagaaactgataaatatagtggcaaagttttgatgatgtgttttatcagcactttctaaggtgtttatttcttcttttggcgtaaaaatgaaattgtaaagggtaataaatgtcatcaataaaccaacaataatcatggtataggaccaggctttggtattgtcgccatatttatgttctaaataaccggcaagcaaaacaattaatccatttccggcaagcatcgaaagtctgtaaaaggtacttctgattcctaagaaaaaagattgctgctctttgggtaaaaccaataaatagaaaccatcactagcaatatcattggaggctgatgcaaaagcggcaacccagaatatggctaaagtcatcatgaaaaaaccacttgtaggaatggtgaatccaacgaccaaaaaagcaatagagatgagcaattgcattgataaaaaccattttctcttagttcctgtcaactcaataaaagggctccaaagtggttttatcacccagggcaggtataataaactggtgtagacgccaatatcttcgtttgatattcccagatttttgtacataattaccgaaacagagataattatggcataaggcaatccagatgcgaaatttagaaacggaatccagaaccatggtttattatctgttttcatttggctgggcaggggtataaggtttaaatggtttttttaggtcgatagctgcgggcgtgctttcattggcataataatcaataaaggttacggcgcaggctttgtactgatttattttttcggcaggaatgctgaatgaaattactccgtttgtttcataaacggtaattttatcgataatttttgtagcgtcattaacatctactttcgaaacatgatctccaccataaattacgatgtagcgcacttttgtattcaacggacttttgattgtgaaggtgtatttactgctgtcttttgaatactcattgaaaaccggtgtatcgattataatgtgctttaaattgggtactgcagccggaagtgccggatatttatattgattttcttctaaaagacgaactatatcaaagttcttgttcatgaaccatttagaactgaaataagcgcttccgcttacttttttgaagcttctagcataatcaatctgatttggaatttcactggcaaaattccagcttttgtcattgtctcctctgattttataagaggcgtgtccgatataaagcgcagtattgttagagttttctgaccaccatttgaccaattttgaataagaagctctcgggttgttcatactccagtacaattgaggaaggatgtaatcgatccatttttggtccatccataaaacaggatcggcatacaaatcgtcgtaattggacgttgactgggtttctgaaccttttggatcctgagatttattacgccacaccccaaacggactgattccgaattgtacccatggtttactggttttgatcatggtcgaaatggtgtgtacaaagttgctcacattggcacgacgccaatcaccaagacttaacccggctccgtattttttgtaggaagtggtatcgttaaaggtttttcccggaacagtatacggataaaagtagtcgtcaaaatgaatggcatcgatatcgtatttgtcgactacttcttttaccaccttggttagatgttcctgaacctcaggtaatgcagggtcgtaatatatttttccggcgtattcaatcatccattccggatgcttaaaaatgtcgtgatcgggacttaactgctgtttgttcaggtcgaaagtagcgcgatacggattcagccaggcgtgaaattcaaagcctcttttgtgggcttcctcgatcatccaggccaaggtatcgtaatacggattgggtgcctgtccttctttccctgtcaggaaacgggaccatggtgcgagttctgttggatataaagcatctccaacgcttcgaatctgaactattacggcgttgtagtttaattttttataagcatctaaaatctcaagatagtccgctttttctttttctacgctgtctttagcggttttaggccagtcgatgttgaccacagttgcaatccagacccctctaaattcgtttttagggtaaagtgttttttcctgtgcatcggatttccatccgaagaaaaataaaaatagaatagagaataatagttgctgatttttatgcatttcaatcttttttaacagaaaccaaaaatagtttttttagatgagtataagaaattataattttagaatagtgattaaggggaatgtttaatggtttaatcgtttattcgtttaattataggttgataaacggagtgaaattctttgctgtttatggtttatggtttgttgtttgttgtttgttgtttgttgtttgttgtttgttgtttgttgtttgttgtttgttgtttgtctgagcggagtcgaacttgtctgtctgagcgaagtcgaggttgtccgtctgagcggagtcgaggttgtccgtctgagcgaagtcgaagacaggtcaacgagaacgtggggggcttcgactccgctcagccggacattagttttagttttgtaaatcaataatcgttaatcggaaatgttaaatataaagggtttatagtttatagtttgtaaatcgaacttgtctgtctgagcgaagtcgaagacaggtcaacgagaatggggggggcttcgacttcgctcagccggacattagttttggttttgtaaatcaataatcgttaatcagaaattttaaatgtttatggtttatagtttatggtttatagtttatggtttatagtttgttgtttgttgtttgttgtttgttgtttgtgagtcgaagctgtctgtctgagcggagtcgaaattgtcagtctgagcggagccgaagaccgacaattttgattctactcagctagacattagttttagttttgtaaatcaataatcgttaatcaaatatcctaaatcttaaatcaataggatttataccttaaaaatgagtctttttttgtaaaaatatcctaaaacacaactccataatagtacatacagtacagaataggtaagggacgataacaattgattttcaaaaagaggactgatcccgtactggtacgcatagtctctaacgtttatagtctcggaaatattttgaggattctgaattttaatcatggcaagtgcacgaggcagtatgccggaaacaaaaaatacaatcattggatttacgccccagctgagtaaaaaagttgtccattttttgtgattgagtatatctactacataatagatcagggtgaggagaaataagccaatcccggcagtaaataaaacatacgagctgctccaaagtggtttatttatagggaaaaatagagaccacagtaatcctgagatcatcagggcaacactgaggattcccattttttttgcaatttcggttttgggtatgggttttagaagcaattgacctattagtagtccgatcaatccgtttgctatagtgggtacagtacttagaataccttccggatcccaggttttggtagcgatgtacatgtgatcttttagtaaaatactatcgagccatgacgctaaattggtacccggttccagatttgcaggaccaattccgggaacaggaaccagtgtcatgatcgcccaatagcccaataaaataagagtacttagaatgatttgggtttttacgtttgtttttaaatagacgagtgaaaccagcagataaacaactccgatgcgttgcagcacacctggaagtctgacatcgctgaaattttcgtgtccgccataagctaaagcgagaaaaataatgaaaagaccaaccgctaaaagggttttaattttaaggttgaagtttccaattaaagcatatccaactaaagcggtgagcattaaacgcacgagaagaagcggaaatccgtcaagtcccagaaaataaatgctgttaaaaaagtacagaaaaaatcccaggcaaatgatgcgcagagaacgggtgattatttttaagatgttttcgggtttgttctgtttaataggcatggcgagtggaatcgcaattccaacgacaagtatgaaaaacggaaaaacgagatcggctaaggtgcagccgttccactttgcatgatcgagaatggggtaaacataatcccagcttcccggattgtttacaacggtcattaacaagacagtaagccctcttaaaacatcaactgaaatgatacgatctttcattttcttattttatttaattcgtttcggagtctttttaaacacatagagacatagcattttgtaaaccgaaaatcaggcatttcactttttctcaatacacatagcttactacgtgaaagaaacgagtttctttttaggaattcttttttatataaatctaggcctctatgtgttaaaataatagccacagattaaaggattaaaaaggttatgaaatctgcaagatctgcaaaatctgcgtgaaaaatatttatcacatagaggcatcgttttttataagtaagatagtctatgtctattggtttagttaaactttcaggaagtatatctttaatcaggtaacgagattttccccatggttacagatggaattcctttgtgtgagccaaaattaaaatcttccccagctatagtttcattagccaaaacagcaaacaaaacggcttctttggcatcgccagaaatacccagttcatctgttttgtgaaaatcgcaaggcaacaattctttaagccattgcaccagtaaaggattgtgcgtacctccgccggacaggtaaattttgaaatcttcgagtctatcagcagagttgtttacggcataatgaatggcttcggcgattgtttcagcgctaaaacgggttaatgtagccagtaaatcgggagcagaaatggtttcagaggaacttctgaccaaagctgcttttacgtattcggcactaaaaagctccggacctattgtttttggaaattcctgacggaaaaaagaatcgtcttttaaatgatcgagcaataactgatttacagttccttttcgggctatttcggcatctttgtcgtaacttttttcagggtaatactgtttcgtaaaaagatcaatcagtgtatttccggttccggtatcggttacgaaggtttcttcgggatttaatgaagcaggtaagaaggtaaaattagcaataccgcccatattgagcatgatgcgattttcgcccttttttccaaataaaaaataatctccataaacggctaacggagcgccttcgccaccggctgcaatgtgtttttgtctgaaatctgaaagggtaatgatacctgttttcacagctatgtggtcgccatcgccaatttgcaatgtggcgtttggaaatttttcctgttggtgtaaaaacttaggagcatgcagaactgtttgcccgtgtgaagcaatcaaatcgatttggctggcgggaatatttcgttttttcagaaaatcgtttatcatttcggcatgcaaaattccaatccattcgttgagcatcaccaaatgttgaaaatcaatttctttcttcgcaaaaactttacggatttcaaatttaatttcttctgaataatcgatagtttcaaattcagttattttgacagcgctattttgccctgaacccgaaatttcgcataaggcaatatcgagcccgtcaagggaagtgccggacattaacccaataatgctacgggtttctttttgagcaatttggtacagtgcgtttatatttttattcatgaaaattgaattttataaagacgatttgaattataaaagtgataaaatgaactcgttgaatgtaatttgttttaacacatagacacatagtattactttttgtacagaaggcgtttcacttgcatcaatacgcataagctatctgaaaaaaacttagattcatttttttgataaaaataaatctgcgtaaatcttttttactctcattttatccgcttaatctgccaaatctgcgagaaaaaaatagctcgcagatttagcagatctggcagattttaattacagttgcggtccagtgtgctaaaaatattttttttcattacatccaagggattaaaattagagtattttggcagtaatcggcttaaaagtatatttttttgtcggtttttttactggtgaaataaaggcctgtataggtaattagtgcatttataaggatcaattcattgtcaaagacataacccaaaagagctttggaattttcgcttaggacataagttaaaataggagctacgatacaaaaccaaggtaccaatttatcggttacaattctgtttttctgaagtaatccaaaagcatacaaacctaaaagcggtccataagtataggaagcggccttgaaaaccagtgcaacaaccgagctgtcattaaaagaattcagaacaatgataaccaaaaagaacaggaacgaaaaggcgagatgcactacatgtcttcgttttacatttttaggatttgaaatgttttcgcttttgtccattcccagaaaatcaacacaaaaagaagtggtcagagccgttaaagcagagtcggttgtagcaaaagtggctgcaatgattcctaataaaaatactagagcgggaacagtagccaaatgattcagtgcaatctccggaaatagaagatccgttctgggtttgttggttactaaatccagcggtacggaaatgttgttttttgcagcatacatatacagtaaagctccaagacttaaaaaaagaagactgatcgtgacaaaaataacggtaaaagtgtacatgtttttttgcgcttctttaatgtttttgcaactgatgtttttttgcattaaatcctgatccagtcccaccattgcaatcatgattagtaaccctcctaaaaattgcttggcaaaatgatatttattggtcaggaaatcatcaaagaaaaaagttttagagtaattactgtttcgaattgctgaaaccgattcgaaaacggtaaggtctaaactgtttaaaacaaaatatatggtgataaaaacagaggacaccagaaagaaagtctgaagcgtgtctgtgataataatagcttttaagccgcttctgtaagtatataaaaaaacaaaggtcagacctaaaaatacggtgagcggaaacggaatgtgatagtagtcaaaaacataacgctgcagtacaagcacaaccaaataaaagcgtaaggcagaacctatggtacggcttaccagaaaaatagaggcggccgttttgtaactgtttgttcccattcttttttcgatatagctgtatatcgaggtaaggttcattctgtagtacaaagggagtaatacttttgcaataacaataagccctacggcctgtcccaatataaactgaaagtatttgaactgctctccgtttggagatccaacctcacccggaacggagataaacgttagtccggacagcgaagtgccaatcattccaaaagcgactaaataccatttggagtttttattggctttgaaaaacgaatcgttgtcctgtccttttttgctgatgatttgagaaatcagtaatagtatgccaaaatatacgatgatgaagattaagatggtgcttgaagacattttggttttggattagtgatgagattatttttttaagttgttcatgagctctataaaaggtctgttaaacacaatattgtcatttcgacgtaggagaaatcacacgcgaaactccgtatagaaagtcgccaatctttgtcgaattactagtgcgatttctccctttggtcgaaatgacataaactttgcgggaaatttattcaccatagtagtaaagagtttatttcttagcggtgtttgcctgtaacacggctctaacgcttttgtgtttatctaacagttcggcagcctgatcgtgttcaatttggagttcttccacgatcattttaatggctcttttgactaatttttcgttagacaattgcatgtcgaccattttgttgcctttgattcttcccaatttgatcatcaccgaagttgaaatcatatttaaagtcagtttttgtgctgttccggctttcatgcgggtacttccggtcaggaattcgggaccaaccacgacttcgatcggataatcggcaacttcggcaattagtcctttactgatacaggaaatgcttccggttttaatattgttttctttggctttttggagtccgcccaatacatacggagtgtttccggaagcggctattccgataacaaaatccagactcgaaatctgatgtttcgataaatctttccaggcttgctcggtatcgtcttcggcattttctacagcttttcgaatggcggtatcacctccggcaataattccgataatcatatcatggggtactccaaaagtaggagggcactcagaagcatctaaaattccaatacgccctgaagttccggcaccaatataaaataagcgtccacccaactgcattttttttacgatggctttgaccagtttttcgattttcggaatttgtttttcaacaatatgaggtaccttttgatcttctgtattcatgttgatcagcagttctttggtgctcatctgatccagatttttataaagggactcttgttcggtttcggggtttttatttttcataatgcatagctgtagtgttgtttaatcgtttatttgtttaaccgttaagctgtttatggtttatggtttgttgtttgttgttttttgtttggaaagcaaaaaataataatcagagaatgtcagtcttcgacttcgctcagactgacaatgcctcgacttcgctcagtctgagtggagccaaaattgtcagtctgagcggagccgaagaccgacaatttttaaatagccggatcagcaggggtattcgtattgttgtttctttcagaatccggataaggataccagttacgatttctttcggcaccggatgttcctgctcccggacgatcaaatcttctgctgtcttccagttttaggctcgacatgtacatttcgatacagcggttgcggtaaatttcggttaagatagccggtttggttacggctcctgcatatggaggaagattagcaccaatgccataagtatctgctccggctgttttggttaaaaccttattgagttcgataagtgcctgcggtaaattgtcttttcgggcataactttcggctttaattagtatcatttcgcctggtaaatacagtggaatcgatttggtattcgaatcaaagaaccctgtggcaacagttggatttgaaccaggtttgatgtaaaaattcagccttccgtcagagtttgaaggagctaaagcagcaggcaatcccaaagtcagatcaacaggctgaaaaacattattggtggtgatcgagatataagcaatagggttggcgctaatcggatcaaaagcaaaaaccgattttacagacaggtcaaccataccggcataggtaatggcgttgtcgtaatctccggtcattagatatgttctggctaataaggcataaacggtatttttgtaattaatgctagtaaccaatcctgttgctccggtcgctttgtccaacagtggttctgcctgttttaaaactttgatggcttctgttaatacatccgctctcgaatcaaaagtggcgtttttacctgtttttaatggtacactttgaaaatactgtaccagagtggtaagcgccattgccttaaaaatagaggcatgaaccagaatactggctttttcggtatctgaagttaatacgttgacattatcaattactttttgcgattcagatttaatcaccaagcattgtgaccacagattgtttacgacctgatttttggtcgaaagtacgccgccacccacagaaagttcaccttcgtcgacatttccggcgtttagcaatcgcagttcttttgtggtaaatccgtttccggtaatggtgttgtacacagggcttgttcggtcaacgctccaaagaagctgtagtccgttggcagcaccaataactccctctcgggttccaaaaactaattcctgagagggcttggtagggtctaaataatcttcgttacagcttgttaaaagcattgtaagggctactatagggatgaatatttttttcatgatgttttgatttggttagaattgaacttttaccgccaaggaataagaacttggaattggcacggttccaaaattgtatctcgctacagaagactgtccgcctgagttggtttccggatcgaaactggtaaaattgtcccaggagatcaggtttcttccactggctgtaaccgtcagatcgtcaaagaaattgtttaattttccgaaagaataattaagcgaaacttctcttaatttcagataacttccgtctaccactctaaattcttccacattataaaccgaccagatgtacccacgtggtaattcgccgttaagctcttgagtcacaatttttcctgatcccacaccttgtctggttctgtaatcggcatcaaaaacatctacgccctgaacgccgtcaaacaataccgaaagaccaaattttttgtaattcagattggctccgaaagcgatgatataatccgggtttggattcccaatttgtttgttcaaaatagttccggttggctgtcctgaagcatctctttgtggtgctccggtattgacatctcctttttcggtttgtggatatccgcttggagttaacaacaaactaccatcaggatttcgggcaaaataagttccgtagaaaattccgataggtttgtccatctccacgaaaacaggagcccctgctaagttgctgtccagtttgaaacgggtttgcggtaatcctgtcactttgtttctattactgctgtagtttacaaaaacatcaagatgcaggttttcttttttgatcagatcgtatttcaaattgatttcgaaccctttgttgttcatttgtccgatgtttttaatcgtattcgttgcgccttcagaagccgccagctgaaccggtaataacaagtcatcaatatcggcattgtaatagctgaaagataaattcagacgatctttgatgaaaccaaaatcacctccaatttcatacgtaacactttgttccggtcttaaatccagatttccttgcttgaatccttcgatcgtaaaagcactgtttcctaaaagtgttcccgtagaataattggtaaaacgggcataaggtttaatcgcggttaaacttcctgattttccccatgaagctctaaaacgtacggagcttacggcatcgtgaatgttttgcatgaagggttcatccgaaaatacataactcacactcgcttttggataaaactgagaacgattagcactcgaaaaaatagtcgaagcatcctgtcttccggcaactgtcaggtataatttgtctttgtagccaacagtttcctgaagataatatccccataaattatatttggattggctggaacttggtgaacccggaatcaaagtattaaaagcattgatggtttcgataaaaggttttaagttacgtccttcaactgctgcaaaattatcacgatacgtctgtacgttgtaacctccataagtagtagctttccatttgtcgttaatagtccaaaggtatcttaagtttaaatcgttgttgaattgtaccactctgttagtagcctcagaaacatacccgtcattgtagtaagccggattcacaacatacggatatctcgggatgaagacatttcctctctgattgtagttgtcgataccaaaaatcaaatcggcattgaagtttttaaacggtgtgtagttcaattgcaaatccgaaataatacggtctgtattttgtttgattttgaaagtttcaatgatcgaaagcggattcaccctgtttggatcaactgccagcagattaccgtttacatctctttgattgatgtcgtaggtattattggtgatgttgatggcattaatcggactccagaagacgttcccgtccggtttttcatttgaactcgagtttacataatttaatcccacagtagcggatagttttgagttgaagtcatgtttcaatctcactttagcacccgctcttttaaaatcggtattttttatgattccttcgtttaccaggtaaccaagagaagcaaaatatttcgttttttcgtctccaccctgtagtgagaaatacgtatcagttccaacacctgtagtaaaaatatcatcctgatagtcgtgtcgctgtacgttagttgttctggtttcaaggtttctgcctaaaaccgttactgtagttggacttgcaggattcccttgaattgggaacagggctggtgaagtacttacaaactgcttgtcggacatgttcatatccagttttttgcgaatttggttagaagtcacgctggttgaaaaggtatatctggtttctcctgcaacaccttttttagtcgtaattaaaaccacaccgttggctgctcttgatccgtaaatggcggctgcagcacctccgtttaagacttcaacgctttgtatatcgttagggttaatgtccgcagatcggttctgaccaatctgcatgttagagtttccggtagtcacgtttaggttggttacgttggtagtggcgttatttaaaaccaccccgtcaataacatataaaggatctgaagaacctaatatcgaagaagttcctctaagcttgatgctgaaacctccggctggatcacccgagttttgagaaacctgagcaccggcaatttttccttgcagcgccgtagaaagacctccgggctgtgctttaactaaatcttctccttttaaactggttacggcattcccgagttctttacgggtagcgcgtacggtggaacccagtacaacaacttcagaaagagcgttcgtttcttcggtcattttaaggttgattgtagtcatgtttgctgagaccttgattttcttcgaagcaaatcctacaaaactaaaaacgagcgtttcgttttcgtttgcagtgatgctgaattttccgtccagatcagttgtagtgcttttagaagtaccttcgatcaaaacggatactcctggaagagaaagtccgtcggtagtactaataatcgtaccggttacggtttttgactgcgcaaaaatgggctgcgcaaacaaaataattccaaataaaaagaatagttttttcatttttaaaatatttgtttggttagagattttaaatgtagagaattaatttttataaatgcaattttttgcaacatatttaatttaaatattaaaaaacgcataaaaatgcattaaattatgattttgtaagtactgaaagccatgtaaaaggtatttttgaaataattgtctaataatcatgcatgatcatgcaatatatttttatatttgtttaaaaaagttaaaatgcttaagaaagagagacatcagtttatcatggataaattcaagagtgtcgaaaagataaacacgatcgatcttgccacagagctcagtatctctgaggataccatacgcagagattttaacgaattgaacaacaaagggctgatcaataaggtatatggagctgcttttccggtaaaagagaaatccaataacgtttttgatatccatataatcaatgaagacaaaaagagaatagtaggacaaaaagccttatcgtttctgaatgaaggtcaggtgattatcatgaccggaggtactaccaatttgtctttttgcaaactcattccaattgatttttcggctaccatatatacgtatagccttcctatagccatgcaattgtcgcagcatcctaatatcgaactgatttttattggtggaaaactacagaaaaaagccatggtaaccgtgggtatcgacgtggtacaggtactgtctaaaatcaaagccgatgtttgtttcttgggagtgagtagtttagatgtcaatcagggacttaccgaaatgggttacgaagtttcgatcatcaaaaaagaaatgattaaagcttccgataaagtaattgtgctcgcgacttctgataaaattaacggcaaaatgccacatcaggtttgtggtctcgataaagtagatgccatcgttaccgaactgaactcgaagagtgctaaaattaaaggctttgtggaggccggggtgagggttgtgtaggttaaattgcgtttttgtgcggttttttgtttgctgtgtgattctaatttgtattggaattgtgcagcattttttttgaatggttgaataaacaggtgtttatacgtgttgtttggtttttatttattgttatacttgtttaataataaatattttgtgcattatggtttccataatctattacataaaaaatggaaattccgaaatcagtatagaagtgttttaagtctcaataatggcaactattacatttgttatgacagaataactatggaatcattttccgaaatcaatgagaaggaaatggaagaactaaataatttagataaaatttttgaagctaattcttttaaaattaaattaaaaaagcaagatttagtattattcagaaatgatttactactgcatggacgagatgaaatagctatagactcaaaaagattaatcaaaagaataaggtttaatatgaattaaaaagagctgttctccaatttttaaatcttccaataaacgcttcaaattctgtaccgccaagatcacctaaacacaaaaacctatttcgtaatgaaataggttttttttaggtctttttttaactgttttacacgttttgcttggtaagtcctgtgaagctcccgtgacaggtttaaaatcatctcagattattggactttgtaaaatttataggctgcattattttagtaatactgcgattgtaaaaccatttacacacatacaaattccttaaaatcgctcaattctaattgtattggagtttcatatcttttattattcaggtctgcggtaaaagattttttgggttttaaagttattagtcctttcgtaaaacttatcgtatcaatcaaggtataaatatcctcatagaattgaagcttgtagtttaatgaaccgcaaaaattattcttcttgtctttgtattcaattacagccattgttccaatttcttcgacttcaatctgataataaatatcaattttaaaggacttggtttcttttgttttaaaatgaatttttattttggtatccaactcagaaataagcttctcagtttgatctactaatgctaaatttaagtcattacttatttttcgcagcacttggaatgttattgatttaatcaggctgtttttttcactatcggaaaatgattgtaatttttcagcgttaattccaaaatctaaatatttaattcttttgtcaacgtttctattagaaactacaatttcattttcttttaatacggttgttaaattgatgtatatatgatcaaattctccataagtgcattttagttcgtttaattttctggcaattcgttgtcctataaaatttgtgtcttttgttggtacgaaaagcttacctagttgtcgggggatgctttgcccttcaatattttgcttttcactttcgtaaaagcgtatgtcttttaatattctgtcacccattttttaatctttattgttggataaatgtattaataattttgcttcagaaaaggactttaaaagaataaaaaaatgtctgatacatccataactttgtattaatattagtttgcatctgtaaatgatatttaacgtatatactatagattaaaagcatgacaaaggaagagtctattaaagagtattattttagaatcaataagagtatagattacattaaggaaaatcttcatgaagagctttctttagaaaaactggcagcgctttccagcttttcaaagtttcattttcatagaatttttaagtctgttacaggaagaacaatcaatgaatttattaaaaatgcaaagatagagagggcgctgtttttcctgatgaataatccgtcaaagacaattagtgaaatagccaatgattgtggttttttgagtgtttcctctttttcaaggagttttcgtgaagtcagacagatgacaccaagcgaatggcgggagcagtataaaaatagcaatattcgtataatagatagcaatattggaaaaatgcagtctgaaatcgaaaactaccttgcactcaaattaaataatttaaaaaatattgaaatgagtgaaatgaaaaaacttgattttgaagttaaaaatcttgaggcgtttaatgttatttacatcagaaatctcaatatccacagtcatgatagtgaaacatttgaagagatgtttaaaaagcttttcagctgggctactccaagaaatttagtgaattttcctgaaaccaaagcattaaccgtttacagaagtaatgctaatttatcaggaatgcttcaggctgacgtttgtttgtctgttcctgagaaaatagttggagagggcatagtgggtaatacaataataagtggaggattatatgccattttccataaagaaggaccaatgtcagaatgttttaaaacctggaattacatatacgaagtgtggtttgaagaaaatggttatcagcccgataatagaaatttctttttaagtcatttaaatgatcctaaattgcatccggaaaaccttcatattgtcgatatctatataccaataaaattactgtaggattaataacttctaaaatcgattttatgaaactgtcatttagagtcacattttctgttacagctaatggtcttcaatttaattttagaataaattatttctaaaaagtatatatgagggtatttgaaataaggtctgagaattgatattctcaggccttattttaataattcattcgaaaacgatctgatatccgaggcacgaaattttatctccgttattttgcagatcctttttttgcgtttttgattaaaatgaaaatagagaataaaaacacgatgctataaagtgctgctaaagcgggtttttcgaaagttagtttttcaaagtcaaattgtttgtacaatgttgctcctaagatgattgcaataattccaaaaacaaatgatgatacttttttgttttccatttttttaatgttttataagtatgttaattagtatttccgctaaaatgcaagtattcctgaggctatcatttctaacatatagggtgtaaattacttcttagaaaataaattctccactacccaggccggaccaatcattagaaattgtaaatctttcaaaaaagaaggtttttttccttcaatgttatgtccgtagaattgaccaatccaggcaattataaatacgccaatagaaaagatccataacggtaaaacttgtccgacatagtaattcacaaccaaacaaattgccgaaaaaacagcaattttcaaagccatcgttaccgacagacgaagataaaaaagaagcacaaaaattagaacaacagccgcccagttttccagaacaggagcgttcagttttaaggtattggagatgaaataacttggaatactcattaacagtccaactatcgaaaagtagatcgctggtacacaaatataatgtatcgccttattcttagggttctgatgactcacagcgtattcatcaaaccattgttctaatgttctcattgtttagggtttagaatagtaaatctactaaaaaaaactttcgttttatcaatttcaattattcttaaaaatatacgatcttaatttttaggaggataccgatatgaaatggaattagagacaatgcagatctgcttgtactttagtactaaagaggaatttgttttttttaaaataaatgtggcaaagtttagattaaacactcaaaaaaaataatgtatttgtcttattgtgatatttttatggcttaattaggtgtgccatttttttttccatttctaaatttgacaataaataaaataactccttaaacaattagtcatgcatcaagaagagattagagaagagaagaccgtaaaggtttatacaatcaattataaaaaagagaatgatgctcaaaaaatggcagacggtttgcaactatataatcataccgggactcaaaataatttatcagaagatcgggttgaagttgtaaaattaatttttaatatacttattctccttgcttttttcttttcatttatagcattgctcattattaaatttttcagttaaatgtattcagaaacttctattttttgattgtagtcaaaaacattatcccataatgagtcaacggttaccaatgcctcatctaaagggataacactccatttaccattggattcaacggctagtttcatagtttttaatttcaacaaagcatcctgtacatcaaagtccagatttgcatttagtgttgttgtaaaccaggactcaatttgattgtcgagttcttcggcagtaatgggatattcggttttgtataaaaaggtataggccagtatcgtttctttcaatacttcttcttcagaggaatttagaagtgaatagaaagcaccgctattgtttccgagatttttaaagtaaaggctgtctgaaagtattttagagtatttgattcttttattgacaaagttactgtactgacgaaacaaataaagggataaaatacccagtgcaattaaaccctgatttaaagaggctttgctgtttaataaatcgatagcttctcccgattgatacgcggcatacatgccaatcaaagcaggaattacagttgtacttaaaagtgaaattccgcctccaattccaggaacccaaaagagcaacttatctttggtagacattcttggaatagcatttgggaatatagtttcgagatcgtttttaggaacacgtttaaaaatctttaaagcaaccgaacccggttcgataggcatttttcccagttttactttcttttctttaatataatcagcttcgctgtaatgaagataaatcaggacacgatcgtaatattcaatttcaatttctttcttccagaaaaaatattttcgaatcttttcttttgccttatgatgtccacgaacgtataattcgtagtctttaaaggcgttgaaatcaattgaaagcttcaaaccgattaagtctgaatcttcaaaagctttgtccagtgtttcctgatctatccgacgataattcccctgttctaataccgtaagtaatgttttcttgaaaacgttgaaatcacttttacctataaaattttcgcgttctttcagacttaaatcaggatcaaacaaagcgtagttttgcttcagatttcgattaagattaaaagcttcgtaatggaaatagtgttcgataatatcaaacagttttctgaaatcatccgttttcttcgaatctttggcaaagacagttagttgttgttccaatagaaattccttgttaaagggaatatagtgttctcgtgtcatagagatatttaggggctataattttttaaggctcaaagatacaaagtgattttgttttgatcatagctagcttttaaaatttgttcgatgatcatcaggaaagaaatctttgcggatgttttcggcagaaagtaaggagtgttttcttgtcaattgaaaacggtgcgtaaaaaagtgagatttttaatcgttggcatcgattaaaaacctcacttaattgttccaaaaaaaaatgacaatatttaataattttctcttaggaaaactacagtttaaaataaaaattatttgtggcaaaactaccacttaagaaagttttggcaacacgtatttatacctgtttttgcgtttttttgtccaaaaagatcagagatttaaagaatatttttctttgatttcattgctttaagattattttttacgacttgttttctctagtgtgcttaaagtagcatttgttgggaattaatccggttcagaattttttaatgctattattttttgaatgtattgtatcagattttctttttctaccgaaaatggtgctttttcatcttccgtattcaggtacaaatctgcaatactttgagcatccatatttttattcacgtaatggtattcggtatatctaataatgctttctacaaaaagttcttgcagtttgcctttttctatagtttcttcgtcaccattttttattttttctatttcagattccggtaaatcaatagtgaggtaagttgtatctacggccacattcgaaagcatttcttgagtagcttttcctgaagcattacaataagcacaaggacccggtgcccattttaattgtttgtttaaacgtcgtatgtcttcccagtctacaaaacctttcccaagacatcttgggcatcctgaatttgattttttaaatagaaaactaaaaaaaggcatttttccgaaaatttaggttaaagttgtttggtcttgcgaagataatttttttatgtaagaaaattatttttaaagcagattgtttttttgagaatttgaggggattttatggagagaaagcatttggtttttatcgtatagatataaagtgcgtttctgtatcaggtatttgactggaatctcgtttagctgctttgtttttttattttttttatgaaaaaaggataatttcttcacgtacagaatctaatttagaaagtttttgcttacatttaggcacctcaaatctcaagagaatctacaagttagggcaatcggattttaaacctgaaatcgcctgaatagagagcattatgtctaagctattcgttttttatgtgctagagtttataaagtttggatgtatgtgtaacagaaattaagaacgaacgtctaagttatttgtaattagcagaaagctcccgaattttttagattggggattttcatgattcattttatagtaggtttataattcagcttgattccgtaattcgttgatcattttatgtatcattaaagtagaaagatatggttgttgaagtttttaaaacaaatgtgcagaaagaggcagataaaaattatgtcattgccgttattcaaagccagtttcctgattataaaatcaactttgacttagaagattgtgataaaatattgcgtatagaaggcattgatttagagcctgagaatattatcgattatgtgaattgtttaggatatacttgtgtaaaattagaataattagaatatgataaattttattgttttttgttttttactgttggtaaaacagtttttaaattaagttttagtataggaaagctttctttaagtatgtgcacattattttttaaatttgtgtgcttatgaaaaaaaggactcctctttttgattttactcaaaaggtcaactataaaaacgaaattttagcgggattaacagttgcgatgacaatgattccagaatcgttatcgtttgcaattttggccggttttccacctttggttggtttatatgctgcttttattgcgggtttggttacctcggtttttggaggcagacccgggatgatttcgggtggagcgggagccactgttattgttttaattgctttaatgaaagcacacggtatcgaatatgttttcgcggccgtggcgcttggaggcatcttccagatttgtatcggactttttaaactcggaaaatttatcagattggtgccgcagcccgttatgtatggctttgtaaacggacttgccgtggttatttttatgtcgcagctggagcaatttaaaattgtggtgaatgggcaaaccacttggttacaaggatctcaattgtatattatgcttgctttagtagtgcttaccattggtattgtattgcttttttcaaagattacaaaagcagttccggcctctttggtggcaattattgtcgtatttgctgtcgtattgatgtttaatattgacacaaaaaccgttcaggatattgcctctgtccagggaggatttccgccctttcatattccaaatatcccgttgtcttttgaaaccattaagatcctatttccatattcggtaattgttgcggcagtgggcttaacagaaggtttactaacattgaatcttgtcgatgaaataacgggtacaaggggtaatagcaacagagaatgtattgctcaggggagttctaacattttgaatggtttcttttttggaatgggggggtgccccatgattgcacaaacactggttaatctttctgccggttcgagagcacgactttcgggaataattgcttctttaacgattttattgattatcctttttggagctcctgtaatcggtaaattaccaatggctgctttagtaggcgtcatgatgatggttgcgattaccacttttgaatgggcgagtttcaggattattaacaaaatgccggcgcatgatatttttgtgggtgttttggtggcagttgttactattttactgcacaatctggcgttagcggttttgattggagtgattatttctgccttggtttttgcctgggaaagtgccaaaagaattcgtgccagacattatattgatgagaaagggacaaaacattacgaaatctatggaccattattttttggttctactactgcttttatagaaaaattcgatcctgcaaacgatcccaatcatgtgattattgattttaaagaaagccgcatcgcagatatgtcggccatcgaagcattgaataatttgacgaaaaaatacagtcagttaaacaaagtgattgaactgaagcatttaagcaaagactgtattgttttacttaaaaatgctgaagctgttattgccgtaaatgtaattgaagatccaacgtacaaagttgtttcttagtagtttaatgtggcaattagagaatatgataattagagaatatgataattagataatgtgtcaattagaaaattttaagcgtaacgtacagtaattatttaattgccacattatctaattatttaagcatgttgctaacttcggagaattttccatctacttcatcgatttgcaagccgagaatatgagcaattaaagggtataccgaaacattctgaaacgatccgaccgttttatttattttaaaagcggggcctttagcataaaaaatggcctgcatgtctttttctttgttgtcgtatccgtgtgtacctccgcttacatgtaccgatttttcttttactaaactgtatccttttttggcttcaatgacaaaatcatgaactctcggattagttccgaagtgtaatcttttaggaacctcttgggatttccaaaatttaatatgcggtactttctttaaagcatttgcgatcgaatcctgaaagccgggttttgcctgaagactcatgatgggattaattacagcattataaccaagccattcgggttttaggtaatccagaacggctacttttttatcatcgctaatgttggccattccatgatctgaaacgataattaaattgatctgtctcccaatggataattgatttagtttagaagatagtcgccccataagagtatccattcttcggattgctttttcgttttcaggagaaagtggaccaaatgaatgaccggtatgatctggttcatcaaaataaagtgtgataaaatgcgggcgttgtttttcgggaagctgaagccatttgattacggtatcaatgcgggtttcgtaaggaattttgttgtcgtactctttataaatactaggtcttttttgatctgtatctgatcccggccagaaaaaagaagcggcttttactccctgttgttcagcaacgttccaaatcggatttccgccataaaaacgggaatcatttttggcatttgaagacaatgaaaaggattcgtttaatgccgcatcgtaaaaaacattattaatgattccatgatgatcggggtagagtccggtaacgatggcataatggttgggaaaggttttactgggataagaaggtcgcattgatttggcatggacaccttcttttgctatttgggcgagattttgaagtttgaaatgtttagcataatcccaacgaaatccatccatagaaactaaaaccacataagtatctttattggtctgagcatgtaatataaaagaaatcgaaaagaaaagtaaggataggagagcggtaaagtgctttttcattgttgtaattattgaattacaaagttatcaataagcgctttcatccgcaaaaacagaatgttaaacaatcataaagtaaaaaagtttgccacgaattacacgaattttcacgaatgctttatctgaaagatcttgccacagattaaaaagattctcacagattgtaaattttttaatcctttaatctgtggctggaaaataatggcctgcgagaattctgggcaaaaaaaatataaaaaaaaacgccagatcgaaatccggcgttttgagttttaaagaaaagaacgattacatcattcctggcataccgccacccattggcataccgccagcgttttcttctttaatatcgattaacgcacactcagtagttaagatcattcctgaaaccgaagcagcattttctaacgctacacgagttacttttttaggatcgataataccagctttaagcatgtctacgtattcatcagttttagcattgtaaccaaagtctccagaaccttcacccacttttgctactactacagaaccttcaagacctgcattttcaacaatagttcttaatggagattcaacagcacgagatacaatttgaattccggttgcttcgtcagcattatccgctttaaggtcagccaaagcagctttagctcttaataaagcaacaccaccacctgcaacgattccttcttcaacagcagcacgtgttgcgtgtaaagcatcgtcaactctgtcttttttctctttcatttcaacttcagaagcagcaccaacataaagaacagcaacaccaccagctaatttagccaaacgctcttgcaatttttctttatcataatcagaggttgtagcctccatttgacctttaatttggtttactctgtttttgatgatatcagcttcaccagcaccacttacaatagttgtgttgtctttgtcgatagaaactctttttgccgttcctaacatttcgatagttgtattttctagtgtataacctctttcttcagaaattacagttccaccagttaagattgcgatgtcttctaacattgcttttcttctgtctccaaagccaggtgctttaacagcagcgatttttaatgctccacgtaatttattcactacaagagttgataaagcttctccgtcaacatcttcagcgatgatcaataatggctttccagattgagcaactggctctaaaacaggtagtaattcttttaaagaagatacttttttgtcgtataataagatgtatggagagtctaattcaacttccattttctcaggatttgttacgaagtaaggagaaaggtatcctctgtcaaactgcataccttcaacaacatctacaaacgtatcagttcctttagcttcttcaacagtaataaccccttctttacctacttttgcaaatgcagtagcgattagttctccaatcacttcgtcattgtttgcagagatagaagcaatttgtttgattttatcagaatcacttccaactacttttgcttgtttcgcaaggtcagcaacgattgcttcaacggctttgtcgataccacgtttcaaatccattggatttgctcctgcagcaacgtttttaagaccttcttttacgattgcctgagctaaaactgtagcagttgtagttccgtcacccgctaaatcattagttttagaagctacttctttaaccatttgcgcgcccatattttctaatgggtcttttaattcgatttcttttgcaaccgaaacaccatctttagtaaccgttggtccaccaaatgattttccgataattacattacgaccttttggtccaagagttacttttacagcatttgccaatgcatcaacaccacgttttaatccgtcacgtgcttcaatatcaaattttatatcttttgccattttttattattgctttaggcagtaggctttacgctttatgctctctctactgactggattagtatttattttatttttgctttaagctttaggcaatatgctttaagctttttgaaaagcctaccgcataaagcttatagcttacggccatttttagataatcgcaaggatatcatcttcacgcatgatcaaataatcagtcccttccagttttaattctgttcctgcatatttaccgtatagaacagtgtcgcccacttttacagtcatagtgtgatctttagatccgtttcctactgcaactacagttcctttttgtggtttctctttggcagtatctggaataaagattcctgatgcagttttagtttcagctgcaacaggctcaataagtacgcggtctgaaagcggttttatgtttaaagccatgatttattatattattaggttatacgttttttttatgttctagaaactttcagaaactgtgccatgctggtaaaactgacattatttcttaaaaaaaatgccagcttttgacaggctggcattttatagtgatattgaaatgtattatttagctgcaggcgttgccggagcaggtgtttgttgagcaggagtagctggtgtagcagcaggcgcttcagttttttcaatgattttagagtcactgtcgcttaatgatcctgtaaagcttaagctagaaagtaaaattaaagcaattaaaatagtagccaatgtccaagtacttttgtctaaaaagtcagttgttttttgtactccacctaacatttgagttccgctaattgtagaagacaatccgcctcctttagggttttgaaccatgattactacgatcaatagaaaacaaactattgtgattaaaactaagaaaattgaaaatgtactcattgtttaaatattattgttattttgttgtaaaatctttatatccgaaatacggtctgcaaagaaactaattttttctggatatttcaaaattaatatttcatatgcttgtattgctttggtgtattttttttgttccaaatatactctggccaaagtttctgtcattaagtaagaattatcttctttgcttaggtctgattgtacggtctgcgttattgcagtttgtttgataggagagatctttggattggtttcgatgaatttatcgatcaattctgcttttttctttttctcttcgtcaattgattccgttactgttgtagattcggttgctttttcaggctcttttatttcgggtgaagtttcttcgcttctgtcaattggttctgttcttgctaattgcagccattcctgaaaagaatgtttctcgttaacagaaaagtctaaaggctgtcctatttccagattttcttccgctgtttttacactctcgggaacttcggcttcttttggttcctcgattaattcagattgttcggaaacaaccgttgtagcttctttgatagaatttaatatcgattgctcaacaggggtaacttttacttctttaacttctggttttatttcctgaatttcttcctcaacgatttcatcaaagaaagttggtgttggctctttggttggaggtaatacaggttgttgttccgtcaactctgtttccggctgcgccgtttctacaggttcttccaaaatgatcggagcaacttctataggttcggcaacaataaattgttctgtaacagattcgacagctttttctattgtttttaccggctcttcaaaagttacggttgccgcttcttgtgcgtaatctagtattgattggtcaataaatagatttacaggtttttcttctacttttacaggtgcttcaaaagttactgttgtagcttcttttatagaatccaaaatagattgctcgattggattaacacgtacttccggtgcttttttgacttcttcaaaggatacgatctcactgtcaaaaactttaatttccataaggtctctaagtttcttatcgtaatattcactttgaatcgaagtgaaagattcagaagtaataaaatcaaataaaacggtacgatccgtagtatgagctgctgtgacttttaacgcataattatacttaaaactgttttgatcgtaaagtccttttaagcgcaaggctcttgcactttgaaaataaggaaattcattcaaaacacttcccaatgcttctgcctgcttttcggtgatagcatcaggcttgttcattaagtaggtataatcggttacattcatttattcttttgtttaatcgtttatgggtttaatcgcttatttgtttaactgtttaatcgcttaaaggttttaatgattcgacagaaaagcaaattaccattttgctagtgactcgttaaaaatatcttgtgtgattctttcaaaaataacctgaatagctgtatttagagtagctccggtaggtagcccctgtcctgggaaatcatagtaaaattcaaatgttttttcgaaatcatctttttccttctttttattggtaaacctcacatgtacacgaatactcaaacggttttgaaaagctccctgatcggctgttgccgtcattggggtagttctgtaatctacaatttctccttcgtaaactaaatcaccactattacttaccaggtttaaattggtttgattttgaattaagtcttgtaaggtcaatgtaaaagttcggtcaattcccggttcaattaaatcagcattattttgaaaaaagttaacctgaaaagttttggcatcgatgtttcctgttcctgtaaagttgtaaacagaacaaccgcttaataggaacaagctcattaaggctaataaagaatatatttttttcataatatcaattgggtgtaaattccaaatataaaattccaaatttttaaggaatcccattttttttcaaatataataatttggatttgagcgctggcgaaccgacgaagcaaattggattttatttttttgtctcagcttttaaacctgaaatttaaaatttgagaattatttatttttataaatcgaattgtttaatttttctatataaagttctttcggaaatgcctaattcgtctgcagcagcttttcgctttcctttgtttttttctagtgactttttgatcatctcgatttctttctgttctaagcgcagaacctcttcttcttcaatggtttctgcaaacagataattgtcgtcctgcatctgataattgtcctcgcgtggagtaggtgtcattacggcggtccttggttcttcttcaaagtctatttcgctttcattttcctgagaaccatatattttctgaattaaattcggattgatgtcctgcacttttgtgccattcttcatcagttctaaagtgagttttttcaaatcgttcagatcacttttcatatcaaaaagcactttgtataagatgtctctttcggtgctgaaatcactttcttttttgctatcgttaataacagaaggcagactgcttccttcagtaggtaaatacgattgtaaaatagcggatgaaatatcgcgattggtttccagaaccgagatctgttcggccacatttcgcaattgacgaatgtttccgttccatctgaatttctgaagaagctgtaccgcatcatcgtctaattttaagggaggcattttgtatttgtgcgcaaagtcggctacgaattttcggaacaacaaatgaatgtcgtcgtttctttcacgcaatggcggtaaagtaatttcgacagtcgttaaacgataatataaatcttcacggaattttcctttttcgattgcattgaacaggttcacgtttgtagcggctacaattctcacatttgttttctgaacttgcgacgaacctactttaataaactcaccattttcaagtacacgaagcaaacgaacctgagtagttaaaggtaattctccaacttcatccagaaaaatggttcctccgtcagctacttcaaaatacccttcacgagtgcttgttgctccagtaaaggctcctttttcgtgtccgaaaagttcactgtcaatggttccttccggaatggctccgcagtttactgcaatatatttcccatgttttctgtgtgaaagcgaatggatgattcgtggaatattttctttaccaacaccactttccccagttaccataaccgaaatatctgttggagcaacctgaatggctttttcaatggcacgatttaattttgggtcattaccaataatctcaaatcgttgttttattgcttgaactgtttccataaaatagttatttcttggattattatttaacagaataattaaaagtcaggcctccgtattctttattgtcttcggttgagattctggacatttttaaaggtaagttattcaactgataactataagtgtttttatatacattgtcgattggaatacctccaaactcaccgacaggataagtagtttttattaaattattttttcctgtgcctgcaacatgatcctgaatacttcctctttccaaaacaaaaggatacccattgcttaaaatatagttcatataatgattcatataaacctgatgtactgggtttattttatcatcatattcgtaggtaacagattcggcgtacagatttgcaggactgtctggtaaatcgtgcgtaccatctgccgatatttttaatgaaatcaaatttttgtttttatcatatttcaaagttgcataggaggttgttcttattggtctgttctctttagcaggataatcaacataattgtgtttagaaataagtagcccttcattgttaaatgtgtactgaacttttacatgattaaaatttggatcatccgtagaaatcaattcgccagtcacaacatttttattgtgagtaaataaccaaacaaaaagttttcctgcggtcccggcttttctggaatccttctccattttaataatttggccattactatcataagtaaaagtggttgtcagagcactatcaggacctacagctatttcagtcattctgttgttagagtcgtacgaaaaatctataaatatttctccttttgaacgcgttattttatcgtatcgggtgccctcattatcaaatagatgtatatttccgtattcaccatgttctttatagttttttaaaatagtaccttttgtattatcatcagtaggagagtcattacttgagcatgataccacaaataaagaaaagaatataataatgaaatttttcataaaagaaaacagataaaaaagttatacattttttcaattttccagttacggaaataacttggaaattgagaactgaagcattaattcatttcagaatatccaaccgcttcgcctttcagcgttccgctagtacagctagtgatttttacgtttacgaaatccccaattttataatcttcttttgggaaaactaccgtgatgctttgcgaatttcttcctgagaattcttcttttgatttttttgaaactttctctaccagaacttctacaacctgtccaacaaattcttcgcttctaaaccaggcatgtttttgctgtaggtcaacgatttcctgtaatcttctggctttggtttcttcagcaacatcatcttccatttttcttcctgccaaagttccgggacgctcagagtacgaatacatataaccgaaattatatttcacatattccattaagctcatagtgtcctggtgatcttgttcggtttctgttggaaaaccggcaatcatatcttgtgaaatcgacgcattcggaatgattgctctgattttatcaatcaaagtcatgtattcttcacgagtgtgcagacgattcatttcttttaaaattctgttacttcccgactgaaccggtaagtgaatgtgtttgcagatattaggatgtttggcaataacgtgtagtacactctcatgcatatcctgtggatttgaagtcgaaaaacgaatgcgcatttttggaaaaccaacggcaaccatttccagcaactgatcgaaatcaacggctgttgctttttgcatttcagaagcatttacaaaatccttctttaatccgccgccataccaaagataactgtctacattttgccctaaaagagtaatttctttaaagcctttgctccatagatcctgaatttcattcatgatgctttgtggttcacggctgcgttcacgtccgcgtgtaaaaggtacaacgcaaaaggtacacatgttatcacagcctcgggtaatcgaaaccagagcagtaataccgttactcatcaaacgaacaggtgagatatctccgtacgtttcttctttggataaaattacattgatggcgtcacgtccctcttcaacttccgctaataaattcggcagatctttgtaagcatcaggtccaacgacaagatcgactattttctcttcctctaaaaattgacttttcaaacgttcggccatacagcccagaacgcccactttcattttcggattgatacgctttacagcattatatttttccagacgtttgcgaatagtctgttctgccttgtctcgaatcgagcaggtgtttaccagaaccaaatcggcgtcttcaagagtttgtgtggtgttaaatccgttttcagataaaatggaagctacaatttcactgtccgaaaaattcatcgcacaaccgtaactttcaataaaaagctttttagtattctcaggtttgttttccaaaacgagactttcgccttgtttactttcctcaataatcttttccattgtataatttcaaagtgcaaagataatgtaaatggagggaatgtgacaagatggcagagaaaagatttttgattttactacgattaggatttgcaattaatattcaacaatctgcaatctaaaatctgaaatctaaaatctacaatctaaaattatatatgtataaagtgagattacagataaatctgcaattttaggaaacataatactaaaataaatcaaaaatgagttcgcgcagttgatatttaaaaaaaatagatacttttgttgcagaaaaatagagcaatggcaaagaatttagtaatagtggagtcccctgcaaaggcgaaaacgatagagaaatttttaggaagtgattttcaggtagagtcaagttacggtcacatagcggacttaccatcaaaggaaataggagtggatgttgagaatggttttaaacctaaatatgaagtctcttcggataaaaaagccctggtaagcaagctgaaaacactatctaagaatgccgatatggtttggttagcgagcgatgaggaccgcgagggggaagctatttcttggcacctggcggaagaattgaaactggatactaaaaaaaccaaaagaattgtttttcacgaaattacaaagactgcgattcttaaagcaatcgacaatccaagagaaatagattataatctggtaaacgcacaacaggcacgtcgtgttttggatcgtttagttggttatgagttgtctccggtattgtggagaaaaattaaaggaggtttgtctgccggtcgtgtacaatccgtttctgttcgtttgatcgtagaacgtgaacgtgaaattcagaactttaatgcggtagcaacttactccattgttgcagaatttgtaaatgaggcaggtaaagcttttaaagcgaaattgccaaagaactttaatactaaaaaagaagccgaagattttttaactaaaaatatcggatctcaatatcaggtagccgatttagaaacgaagcctaccaaaaaatcaccaactgcaccttttacgacttcgaccctgcaacaggaggcggcgagaaaattgtatttgccggttggaatcaccatgcagttagcacaacgtttgtacgaggccggattgattacctatatgagaacagatagcgtgaatctttctgctgaggctatgagtgctgctgaggctgaaattataaaatcatacgggaaagagttttctaaaccgagaacttttgccaataaaaataaaggagctcaggaagcacacgaggcaatccgtcctaccgatatgtctcgtcatacggtgaatatcgaccgcgatcaggctcgtttgtatgatttgatctggaaaagaacattggcctcacaaatgagtgatgcgcaattggaaagaaccaatgtaaaaatcgaagcaaacaatcatgatgagatttttacagcttcaggagaagttttactttttgaaggattcttaaaagtatacttagaaggacatgatgatgatgaggaagagcaagagggaatgttgccggctttgaaagtaaacgaaaaattagcaaacaattatattacagcaaccgaaaggtattcaagacctccggcgcgttatacagaggcttctctggtgaagaaattagaagaattaggaatcgggcgtccgtctacctatgcgccaacaatttctaccattatcaacagaaactatgttgaaaagggaactctggaaggacaggaacgtaattatacgcaactgaccttgcaaaatagtaaagtgggagagaagctgttaaaagaaaatacaggttccgataaagggaaactggttccaacagatatcggaacaattgttactgatttcttagtgaagaactttgggaatattctggactataactttacggcaaaagtagaacaggattttgatgaaattgccgaaggaaatattgactgggcaaccatgatgcaggagttctacaataaattccatccaaatgtaaaagaagttgaggcgaatgctgagcgtgaaagcggagagagaattttaggaaaagatgctgacggaagacaagtttcagttcgtttaggaaaatttggcccaatggctcagattggagaagcggacgacgaagataaaaaattcgccagtttaatggccgatcaaaatatcggaagtattacactggaagatgctttgaatttgtttttacttcctaaaagtttaggtgaatacaaaggagaagaagtggaagtgagtaacggtcgttacggtccatacgtacgtcatggaagtgtttttatttcgttgccaagaggagaagatcctttaagtgtatcaaaagaaagagcacaggaactgatcgatgaaaaagcacttgcagatgcaccaattgcaacgtataaaggcgaaccggttcaaaaaggagtgggacgttttggtccgtttattaaatggaatggtctttttgtgaacgtaagcaagaagtataattttgataatttatcgcaggcagatgttgaggaattaattgaagataaattacagaagaatattgataaagtgcttcacaactgggaagaagaaggaattttggttgaaaaggcgcgttggggtcgctcagtaatcacaaaaggaaaaatcaaaattgaactgagtaaagaggttgatgctacgaaattaacattggaagaagttcaggaaatgattgccaaaaaaacaccggctaaaaaaacaccggctaaaaaagcgacaaccgcaaagaaagctacaactgcaaaaaaagcacctgctaaaaaaccagctgcaaaaaagaaataaagaatggagtttgattttttagagccacttaacgacgggattttaaaatttattagttcgttgtcttcgcaggagttgggaagtaagatagttttgcatactgaggatcagtttccggatatcagtaaaatcaatattgcgattattggtgttttagaagatcgtcgtaatgaagattcaattaacattgttaatctgaatgccgttcgtaaaaaattgtatgggatgtttccaggaaactgggatgcttcgattggcgatttgggagatattctcgcaggaaattctgtagaagacacttattttgctttaaagcgagtaacatctactttaattaagaacaaagtgattcctatagttcttgggggttcacaggatttaacctatgctttatatcgtgcctatgacgatttagagcaaatggtgaatatggttgctgtggataataagtttgattttggtaaagagaatgaaacggtttcagctaattcttatttgactaaaattattatcgacgagcctaataatctttttaattactgcaacattggttatcagacttattacaattcacaagaagaaattgatctgattgaaaaattgttttttgatgcctatcgtttaggggaaatctccaataagattgcattggcagagccagtttttagagatgctgatttggttagtatcgatttgaattcagtaaaatcttcagcttcaggaaatatggtttcatttgagccaaacggtttcaatggaaaagaaatatgttcactggcaaggtatgccggaataagtgataaagtttccagttttggaatttttaatcacaatagtacagtgcctgaagctagtatcattgcacaaatagtatggtattttattgaaggatatcattataggtctaaggaatatccatttggtagtagagcaacgtacttaaaatatattgttcctcttgaagaggaagaattgatcttctataaaagtgataaaacagaccgttggtggattgaaattccgtttgaatcaaatggtcacaataaattaaagagaaatacgttattaccgtgttcttacgatgagtatttgagtgcttgtaatcaggaattgcctgaaaggtggtggaaagcgcaacgaaaaaatgctttgtaaaatgaaattttagcagaaattttattttttttgcatttctgaaatagtgttaaataatattagtaagataagtagcacagtaactgataaataacgtcttacgtcgattttttgtgttagtttatcgatgaaatattttttttttattttatttaacattatttttgaccgataaaataaatttcgcaactagtattgttttttagataaataataaatacgtttacggacttataataatgaatagataatcccaaatttatatgaagaagtttattgcatttgcaacaatgttaacactggtaattggctgtggtaagtcaggtgacaaaggtgagttggtaggtgttacaggaggtaaatggcaccctgagaagccttatggaatgacattagttcctggtggatcttttattatgggtaaatcagatgctgatttagctaatgtggaggatgctcctactaggacggtgacagttcgttcattttatatggatgaaacagagattaccaatagtgagtaccgtcaatttgtagagtgggtaaaagactctacaatgagagttcgtttggctattttagctgatgaaacaggtcaaaaacctgcaggtgattctaaaggtaaaaaaggcggaagtattgctgattttgcatttaatgattcagatccggaaaaaatgactgcatatgacaaatatatgtatgataactactacagtgtaggaacgaaagatgatccttatgcaggtagaaaattaaacaaaaaagtaaagttaattaaagatacaaaagcttacccggatgagtattatactgaggtaatggattctatgtatttgccaattgaagagtcttacaatggtttaagaacaattgatgtaaacaaattgaaattccgttattcctggatggatattcaggctgcagcgaaagctaaagttggaaaaagaaaagacttcgttaaaacggaacaagtaagtgtttatcctgatacaacagtttggattaaagattttgcttattcttataatgagccaatgcataacgactatttctggcataaagcttatggagactatccagtagtaggggtaacctggaaacaggcaaaagcattctgcgcatggagaactttgaataaaaacggttatattaaatctaagaaaaaaggacgtgacttagtaaatgctttcagattgccaacagaggcagaatgggaatatgctgcaagaggaggtctggaatcagctacttacccttggggaggtccttatacaaaaagcgacagaggttgtttcttagcaaacttcaaaccaagcagaggagattatgcggctgacgaagcattgtatactgttgaagctaaatcttatgaagttaatggttatggtttatacaacatggcaggaaacgtttctgagtggaccgattcagcttataatccaaatgcatacgagtatgtttctacaatgaaccctaacgtaattgacgggaacaatcaaagaaaagtagttcgtggaggttcttggaaagacgttgcttatttcctacaggtaagcacacgtgatcacgaatatgctgattctgccagaagttatattggtttcagaactgtacaagattacatgggaactcaggcaactggtggtaagaagaaaaagtaattatcgaattaattaaaatcaaataagtaaaccaaatcaacaaatctattttaaattaaaacctaaaaaaaagtattatggcattattaagtaaaaaagcaatgaatttcgcttatggtatgggagcggcagtagtaattattggagcattattcaaaattactcactttgagattggaccattaacaggaactgttatgttatcgattggattggtaactgaggcgttaatctttgctctttctgctttcgaaccagttgaacacgaattagactggactcttgtttaccctgaattagcgaatggtcaggctagaaaaaaagctgacaaagttgaggcaccatctgacgcccaaggattattgtctcaaaaattagatgcaatgttgaaagatgctaaaattgacggagagttaatggcaagcttaggaaacagcatcaaaaatttcgaaggagctgcaaaagctatttctccaacagttgattcaattgcaggacaaaagaaatatgctgaagaaatgtctatggctgctgcacaaatggaatcattaaacagtttatacaaagttcaattagaaagtgcttctagaaatgcacaagcaaacagcgaaattgctgaaaatgcttctaaattaaaagaacaaatgcaatctatgactgcaaacattgcttcattaaacagtgtttacggtggtatgctttctgcaatgagtaacaaaggataattagtttttgactattatattaaatttattaataagaactaattagaaaaaatggcaggaggaaaattaacccctagacagaagatgattaacctgatgtatctggttttcatcgcaatgttagcaatgaacgtatcaaaagaagttatatctgcttttggtttgatgaatgaaaaatttgaagatgcaaatacttcttcagttactacaaatgctggtttattgacagctttagatcagaaagctgctgaagctaaaggagaattcgctatcgctgcgggaactgctcataaagttgaagcgattacaaaagatttttatagttttatcggaggtctgaaaactcaggctgtaaaaggatttgaagtagataaagaaactggaaaaatgccttatgagtctatggacagaggtgataacatcgacgactggtttacgggagatggttacactaaaaaaggaaatgaaattatcgctaaaatcgagaaatacaaatcagatattaaagctgctttaggtacagataaaaaatatgctgatattattgcagaggtagagaaaaaatttaatgtttctgatgtaaaaaataaagaaggtataaaagaaaaatacttagcataccactttaaaggatttccagcaattgcttcagctgcaaaactttcagcttggcaaaatgatgttcaaaaacttgaagctgacgtttacaaccgtgctttaggaaaagcggctgttgctgctgcttcttacagcaattatcaagcgattgttgttttagacaaaaacgcttatttccaaggagagaaagttactggtaaggtagttttaggtcgttacgacgaaaacacaaaaccaacttcattccaaggtcctggacaaattgttaacggacaagcggttatttcgttaactgcaggaggtgttggagagcaaaatattaatggacaatttacattcttagaagacggtaaaaacattccacttaaatttgccggaaaatatgttgtagtaccaagaccaaactctgctacaatttctgctgataaaatgaacgtagtatatagaggagttgtgaatccaatctctgtatcgttcgctggtgttgatgcaaacaaaattgttgcaagtgctccaggattagtatctgccggaaaacctggaaaatataacatgaacccgggttcaggtactgaagctactatttctgttactggtacattgccaaacggagataaagttacagataagaaaacatttagaattaaaggtattcctggaccaactggtacaattagaggagaaatgggtgttgttaaaggacctaaatcgaacttagaaattgctacaattggtgctaaattacttgatttcgatttcgaagttggtttagatgttgttggatttaatttgaaaattgcaggacaacctacagtggttgttaatggtaacagattaaatgcacaatgtaaatcagttcttgcaagagctggtaaaggagaccaggttactatttctgaaattaaaactaaacttgttggagctggtagttatttattgccaagaactgctccggtaatttacgaaatacaataatatagtaggtaaaactacttcaatatcttataatgatatcatgatgaaagtaagaaattttttaatagctattgtttctatcgctggaggattttcttcctatgcgcaatcgaatttgcttaatgcgaaaacaccggctcagataggtcttaagactcctgcgcaacttatttctgataacgataagcctttagcttatggttatgtagatgatagagatatcttaatgggaaaaactacttgggagatcattgatttgaatgaaaaaatcaattttccaatgtactttccggttgatacggctaatattggttctgacagacgttcactttatgatgttttgacgaaagctgttaaaagcggcaaaataactgaagtatacagcgacagttatttcaatactaaaaaatctttgaaagatattcagggtgcattatcacgtattgacacaacagatgcaggtagagaattaatcaatcaatatccggacgactacaaaacacgtgttgtgaagaaaaaagttgtaactggtactggtaagaaaaaagtagtttcttatgtagatgaaacggttggtccaacaagaacggttccagcggagtatattctgaaacaagatttaactgctgcagatgttacacaatataaaattaaaggatactggtattttgacaaacgtcaaagcgaattgaaatatcgtttgcttggaatttgtccagtaactccggatgtttacacaatgaatagtgacgaaaaagattatattgagttgttctgggttttcttccctaacgccagagaggcgctacacgaagcaaaagcattcaacgataataactctgcacttccaatttcattcgatcagattttgaattcaagacgttttaatgcggttgtctataaagaagaaaacttgtacggagatcgtgagattaaagattacatgaaagataatgcacaaaatcaattgttagaatctgaaagagtaaaagagaagattcgtaacttcgaacaagatatgtggaactactaagtatctgaataacaatatatgaaaaactcttactacatttgtagtaagagttttttttttgctcattatcttgagaatcagtttaaatggtgaatttgttgagctttttagagttgattccgattagagtagttgttattatggtatttttaaattttgtgagaaaaaacacaataaataccgtatatttacgttcaataggttttaattgttgtatcatgaaagtaaagattttttttatcgttattatttttgttatcagtaaccttagtattaaagctcaatcgaatttgcttaatgcgaaaacagcaggtcagatcggggtaaagaatcctgctcagttgcgtgctgataacgataagccaatggcttatggttatgtagatgacagggatgttttaatgggaaaaacgacctgggaaattattgatttgaatgagaaaattaattttccattgtattttccggtggatactgccaatattggttcggatagacgctctctttatgatgttttgattagaggaataaaagcaggaagaatcacagaagtgtatgccgatagctactttaatactaaaaaatccttaaaagacattcaagggggattgtctcgtatcgatacgactgatgccgggagggaattaatcaatcaatacccggacgactacaaaacacgggtggtgaagaaaaaggtggtgactggaactggtaagaaaaaagtagttacttatgttgatgaaacagttggtccgaccagaacggtacctgctgagtatattttaaaacaagatttaacggcagcagatgttactcagtataaattgaaaggatactggtattttgacaaacgtcagagtgaattgaaataccgtttactcggaatttgtcctgtgacacccgatgtttatactatgaatagtgacgaaaaagattatattgaactgttttgggtcttctttcctaatgcgagagaagtgttgaacgaagcaaaagcatttaacgagtcatttctgactcggtttctcaatacttagtactaattacttaatacttatttcacttcttcgaattcaacgtcttcaacgttgtctccttgagattgctcttgttgtggagctgcttgttgcccttcaccaccttgagcgtacattgcttctgtagctgttttccaagctgcatttacattgtctaatcctttttggattgcatcaagatcttgagattggtgcgccattctcaattcagttaaagcatattcgatagctgttttttgatcgtctgtcaatttatctcccaattctttcaattgactttcagtttggaaaatagtactgtcagcttcgttcaatttctcagctctttcttttgcaattttgtcagcatcagcgttagcttcagcatcttttttcattttttcgatttcttcagctgttaaaccagaagaagcttcgatacggatatcgtgagattttccagttcctttatcagttgcagaaactttgatgataccattagcatcgatatcgaaagttacttcgatttgaggaactcctcttggtgctggtggaataccatctaagtggaaacgaccgatagttttgttatcagctgccatagctctttctccttgtaatacgtggatttcaacagatggttgagaatcagcagcagtagagaatacttgagattttttagttggaatagttgtgttagactcgattaatttagtcaatacaccacccatagtttcgatacctaaagaaagaggagttacgtcaagtaacaatacatcttttacatctccagataaaactccaccttgaatagctgctccaatagcaacaacctcatcagggttaacacctttagacgcttttttaccgaagaatttctctacttcgtcagcaattcttggcatacgagtagaacctccaacaaggattacttcgtcgatatcagatgtagataaacctgcatcttttaatgctttagcaactggctccatagaacgtttaactaatgaatcagttaattgctcaaatttagctctagataattttttcactaagtgttttggtccagaagcagtagccgttacatatggcaagttgatttcagtttctgaagaagaagacaattcaatttttgctttctctgcagcttctttcaaacgttgtaatgacattgggtcaagacgtaaatcaataccttcttcagctaagaattcatttgctaaccagtcaataatttcgtggtcaaaatcatctccacctaagtgagtatcaccatttgtagacaatacttcaaaaactccgtctcctaattcaagaacagagatatcaaaagtacctccacctaaatcgtaaacagcaattttttgatctgttccttttttatccaatccataagcaagtgcagcagcagttggctcattgatgatacgcataactttaagaccagcaatttctccagcttctttagtagcctgacgttgtgcatcgttaaagtaagcaggaacagtaataactgcttcagttacagtttgacctaaatagtcttcagcagtttttttcattttttgaagagtcattgctgacaattcctgagcagtgtataaacgaccgtcaatatccacacgtggtgtattattgtcaccttttacaactgagtatgaaactctttttgcttcgtttgtagtctcagcaaaagtgtgtcccataaaacgtttaatagaagcaatcgtttttgtaggattcgttactgcttgtctttttgcaggatcacctactttaatttctccaccttcaacaaaagcgatgatagatggtgtagttctttttccttctgcgttagggataacaactgcttcgttaccttccattacagaaacacaagagttcgtcgtacctaagtcaattccgattattttacccattttttatatatttaatttttgatatacattttataactcaggtggcataagtcaatctttgtgccaatataaaaaaccaaagtaaattgtcagttttactattggcacgacaataatcatctgacaacatgacatttttaatacctgacatacgtggcatatcagtactttatctgtcattatcacgagcttttcaatagcttttaagttttgaattaccgaataagaaacaataaaattaagccgattgcgggaagacgtacaataatttaaaagtttttactcattttagctaaaattttatgaggtccagaaatctctacaacaaaccagttgtaaacgaaaagtcaaattaatcggaaattctaaataaaaaacatctgattttttaaatttcaactttacaattacttgtacaaacagaagtaaccacaaataataaaaagagtacccctttaatccataaccttagtgttgcgccacaacagcaggtataagtgcaaagaaaacggatagaaaaataattttaaactagtattgagtaagcatgaacaaacaaaataccgacataaaacacatttcagcttatagagaacaaatggggcctgagtatgaaaaattgcaccctgaaatacaaaaacgatttgacttttcgacgacaaacaatatcgcatttattggtaaaggaacaatggataacatttggaatggaaacaaatttgctgtttttattctcaaactcttatcgaagaccaatattctatttccgagagttggacaaaacattgaatatgaaattcacaattatccctatttagataagttcaatcgagaagtacattctatgaatagagtatttttctttcctgacaaagaacaacgctttgacggaactgccacttatagtcagacgaagaaacatattgtagaatatttaggacttgatcatagaatggtttttgaaatgggtttatcagctgaagacggagcaattaggtttacatccggtagacaatttgcttttgttggcgggcttaaactccctataccaaaattagtaagaggagatattgaactcctggaatggtttgatgatactgaacagaaattttatttagacttgagtgtaaaaagtaaactcttcggaccactttttggatttaccggttggtttaatgcagagtatattgattttcgtggacaaaaaatcccaaacaaatttaaaccgacaagagaagagataaaagaataatccgtatcaaaaacaccatcacctaaaagtcatgccacaattgaagtcattagactgaatttgaagattattttgtttctaaaaatttacttcgtaattcgttattgcatgagttcctaaaaactaaacaactatgaaaatcccaactatacacggatatattgacagaagaattttaatcaattttacggccgaaccaaaggtagtagagaaaattattccgtttccattcaggccaaaaatttacaagggcaaagctatcgttggaatttgtctaatcagattaaaaaacataaaaccaaaaggattccctgactttattggagtaaactctgaaaatggagcacatagaattgcagttgaatgggatgaaaatggagaaacaaaatcaggtgtgtacattcctagaagagatacttctttaaagctaaacacaattgttggcggacgggtatttccaggtaaacattattatgcaaaattcaacgtaaaagaaaaaaacggaaattatcaaattaattttaagagttctgacggaaccatgacattaattgaagctgatgaggcaagtacttttaatgaaaaatcaatttttgaaacactatgcgatgcctctgatttttttgaaaatggagacctcggatattccccaaatgacaacaaatttgatgggctaaggttaaaagcgtatcattgggaagttaaaccgcttgatgttctgaaagtaaaatcaactttttttgaaaatgaagaaattttcccaaaaggtaccgtgaaattcgacaatgcattacttatgacaaacatcgaacacgaatggaaaagtgaagcgaacaaataatcagtgaccatagcagtcttgtttcgagagctctctttaagtccgaatttaaagatgatttgcaccttgtattcctcaaaatataccgaacttactaaacataatccaaaaaaaataaaaaccaaaccacagaaaaaatgaaaattaaactaacattttctctatacttcttactattaattaatgtacaagcgcagaataaaagtgaatttattataaaggatattaatttgctgccaatgaccaatttggacattattaacaacaaaagtgttttaattcaaaatggcaaaatagttcagattgatgacttcaagaaattacctaagattaggaaaatcaaagtaatacaaggaaaaggaaaatatttaatgcctggattaaccgaaatgcacagtcatttacccgttgaaagtaaagttgacaccttgctaatcgaaaatattgctgcaggggttactcgtttgcgtattatgaatacgaaaactcctcaattacaactaaaagagcgattaaaacacagtccaaatacaattactcctaaactatattacagtcatattattacacgtgacgtcaaatataatgaaatacaatttgacagtttgatggctgaaattaaaaaaaatgacattaatttcataaaattattcagcatagcaaatgaaacggtttttgataatttaatggcttctgcgaacaaaaataatgtgattgtttgtggacattatccaagcgggataaaaatcgacaaagtcctaaattcaggttttaaaagtatcgaacatctggcaggatatgataaaataaaagatgaaaatgaattaaacaacgcaatcaaactaacacaggaaagaaaggtttttaattgtccaaccttagattgggacttaatggcatatgatttacaatacccaaacgaatataaaaaccgactcacctattcaaatttaccaactaaatatttaaaaaaatgggaaactcaatatagccaagcaattgagaaagcaggtttggaaaaagttttgctcaacaaagaaaaatacctccctacttttgcttacaaacaggaaatagtaaggaaactacataaaaataattgtttattgcttttaggaagcgatcctggaaatagttttcaaatgaatggttttaatatgtttgaagaaatgtataattggtctaaagcagcaatcgacaatttcacaatcctaaaatcagcaacaataactcctgcaatattctttaacgaagatcgcatttggggcacaatcgaaattggaaaatctgccgacttgatcgtacttgaaaaaaatccgttagaagatattaaaaatatcacaacagttgaaatgacaataaaagagggcgaaatttatctaaaaaaggaacttttgaataaactgtaaactccgttgaaaaagaattgtgaaaaagcacaaacaataaaataatggctaaaaaaagaaaaacgcttccaaaaaattttgacgaattaattaaaaagaaagacattgaagctctaaaaaaagtattcgacacttgtgaattagacgcaagaggcggttacggaaaaacaacagcattgagcttttggggaatcccaaatgagcttgtacactggttagtacaaaaaggcgcacatctcgaagctattgacacttataaccgtactgcactgcaccagcacgcttcgatacgtagtggagatatagccccttttttagaattgggtgccaatatcaatgtactcgattataatgataatacacccttacactttgcagccggcagtggttttaatgtagccgcagttaaaaagctgattgaatacggagcagctaccaatgctttaaacagagacaagcaaacgccattagtatatgctttaaaacgagccagtaatatcaacctcatcaatttggcagaaatatcaaaaatacttctgaaatcctcccttgaaataacacaagagatgaaagacactgttacacgacgaggggaagattttgaatttcatcgggagaatttcaataaagattctttgaatgatacagattttgcattaaatgagctttacactatttttgatgttccgccagtaaaaaaacgaattctgcacgatggcatgtctccaattgttgtaaacggtggtacctggcaaaaacaatacgaagaactttgggagctattggtcccatcaaaaggcagtgcaaaaacgattcagggtgaagtggtccgtatttcaggaaaagtgagagacgaaatctaccgtaatggaggcggaaactggaatattgattttaaaaagatgttagatgcactttttacccacctatcttcaaaccattgtctgtctgatcaagaacttgaagaagccaattcaattataaaagatattcgcaaaaacggagacggagagtctgatgaacttatttttttatgcgaactggctactaaatgggttctggcgaatacaacacccattttacttgatacacccaattataaaatataaacaaattaataaacaaactgatgattgaaatcgataaaattgcattaataaaagtcgaaaatggccaaattttaagcactaaatcaagagggaaaaacaaatattatattccgggcggaaaaagagaagctaacgaaaccgatgaacaaactctaattagggaaatccaggaagaactaagtgttgaaatcctaccggaatctatcgaatatgtgggaactttcaaagcgcagtctgacggacatgcagatggaattaccgtaaaaatgacctgctacaaggcagattacaccggaactccaaaggaaagcaatgaaatagccgaaattaaatggttaaattataaagatctcgacatcatttcagaggttgataaaattatcttcacacatctgaaagaaaacggatggatcaattaaacaaaaattaaagatgggcgaagagaattttttgttttgcagtttcagaaaaccataacggaaccgacaaggcatcaaaaaaagcacaaacaattgacaaactgcaatataaacaattaccattaatactattcgcatatttagtaaattgcagtactaaaatttcagtacatcaataacaattgtaaaatatggaaactaaaaaagcatatatcgcaggaggctgcttctggggaatggaagaactgttcagaacccgtccgggaattttaaatactgaagtaggttacattggcggacaaaacgaaaacccaacttacaggaatcatcccggccatgccgagggaatagaactgacctatgatcctgaagttacaaactttagagagattctggactacttttaccgcattcacaatcctactacgatagaccgtcagggcaatgataggggttccagttatcgttctgccattttttatcaaaacgaagaggaaaaggccattgccaaagaggtcattaatcttgtagatatttcaaaaaaatggggagaaactgcagtaaccactttagaaccttatagtactttttgggctgccgaaccggagcatcaggactatctgcaaaaacacccaaatggttacacctgtcactttgaaagatttgaagagagtttcttactctaagcactaaccatcttttatctccaataaagaagatcataaaaatttcaaaactttattggagatcgtattggatcaaaatagactgaaattaataagaccgtaatcaaatgaatacaataggttttggaggaggctgtcattggtgtaccgaagcagtttttgatttttttaaaggagtaaccaatgtgcggcagggctggataaagtctgaagcacctgacgatactttttcggaagccgttcttgttgattttgattcccgtattatcccgttagaagtactcattgaagcacacttaattacacattccagcacttcaaatcacagtatgagagaaaaataccgatctgctatttactttttcaacaacaatgaagctgcccaaatttcagaaatactccaaaaactggatcataaattagaccgaaaacacattaccagaatcttaccttttactgcctttaaaagcaacgaagaacaatttctacactattacgaaacccgaaaagaagctccgttctgccaaactactattgttccaaaactgaaaaaattacaagaggagtttgaaaaacataaaaaaagcagttaaaattaaagtaaaatattctttcgttttccaaaagagatataaatattcgtaatttcggtttttcattaaaattacaattacaaaatggcttcatttattaaagaaatctcttttcgctggtcggatcttgacccaaactttcacgttcgtcacagtgcttattacgattttggcgcacagcatcgtattgaaatccttgaagaactgggtttaactttaagagtaatgcaaacgcagggttttggacctgttttgtttagagaagaatgtattttcagaaaagaactaaaactttccgataaaatatttattcataccaaaacctcaaaaatgaaagccgatgcttcacgctggtcgatcattcatgaattcagaagagaagacaatacgctttgtgctgtcattacagttgacggggcctggatggatactaaacttcgtaaactagcttctccaacaccggaaatcgccatcgaagcattaagcatcttcccaaaaagtgatgattttgttggactttaaagcaaaattcaatctgatataaattacaaaaatccaaaaagcacattctgacaaaagttgttttttggatttttttcaaacttaaaacctatgatcgactacttaaaagactttagaatagggattttcattgccgttatagcgattaccactgtaattcttggcgcgattaccgataaggtacttcgttattttttgtatcgcaaacaggccaataaagaatatgatgctaccggctttaagttcctgaagcacctgatcattactgtaatttatattttaggatttgcctttgcgttaattcagattcccgaatttaaaataataggtcactccgttctggcaggagccggagtaatctcaattgttgccggtctggcttcccaacaagccttaagcaatattgtaagcggaatatttcttgttgtttttaaaccctttcgcatcaacgataaaattaccatcaacaattttgtgggtactgtagaagatatcaatcttagacaagtggtcctgaaagatgccgaaaacaaccggattatcattccaaattcagtaatcagcgcccagattattgtcaacaccaacatgcacgatagcaaatgttgcaaaatcatagaaatcggtattggttatcagtctgatattgaaaaagccttagaaatcatgcaagacgaaattgccaaacatccgttttttatcgatacccgaactgccgaaagcaaaaaacaaaacacacctctagttgtagctcgtgtagtagcactggcagactcaagtgtaaccttaaaagcatgggcatgggcaaaaaactctacagagggctttatcctctattgtgatttgctccaaagcattaaaaaacgttttgatgaaggcggtattgatattccttatccacagcaggtaataacgctcaaaaagtagttttactcttcaaatcatttcatgccacaattcaggacttctttattgaaacttgagtccaaaattaactttatcaaaagtagtactgcaggaaaccgcaaaacgtcccacattaaccgttccgaaaattccttcttctccatggccggaataaaatcctcctgccgaaaaacgagcattctgatacttcagtgcaatatcattaaccctgctgtttaactgtccaaaaacaataaggttgggaacaatttcataactcgcaaagacttttggagccagttttttataatagccaaacccctcatcactaccattatgaatactggaagaatgcagatttgccagacttcctccaatgaaagtattctcaccaaaatgccaggatacactaaaacctgtaaaggttccgtcatatccgcttcgggattctacataacccacagagattgttgcacgaaacttatcacacatcttaccaatataaccaacgtaggttcggtctaattcagttttattaacacctgctccaaaaataatatcatcctgacacatggtaagcgcgtactgaaaataagccgaatactgatttttatttcccgcaatgacacttctccccttatccagatcaatatttggcgaaatcacagtcgaatttatcacagcaaaatcaaatgtattcatttcctgcgcaaatacgggagaagcaattagaaacaaaagtaagactgttttcataatgtcaaatttaggtgcaaaattcttttactaaattactgacaaaatgatacgctgaaaaagaaactccacaaagtgataaaatactcgttaaaatacaatatattaagaaaaataggagaatttcactctcttctatttattatttattgcattttcaattccattttaaaatcataaattgtatttttgaatcaataacacaaattaaccaaaccaattatgttagttccctttttacaagtttccggaaaagaaaacagacacaccttgctgcacaactcagagaaaacaagtaaaaaacaccacaattattctttttaattcacatcatttaaaattaaaatatatgtttacaatagaacaaatcaaagaagcacatgccaaagtacaaaccggtgctgacttccctaattatattcaggacttaatcattttaggcgtaaaaggctatgatactttcgtgcatgacggacatgtggaatactacggagtaaacaattatcatgtaacggctgacgaaaaatacgacgagataaaagtagaatcagttccaaacaaagaacgttttatcgaatttttagtgatgcatcaggatggtcagaccgattaccttactttttgccgtcacgctgctcaatgtggaatagccaaatggagagtcgacattatagaaatgacctgtacttattttgacaaaggcgaaaatgaaattttaatcgaaaaaattccaggttaaccttttaatcctaaaaataaaacgatccaaagaatcctacttaatgaaaaatacaatcgccgtagtgggtctcacactattactatttgcctgcaattcaaaacaaccggaagataaaataaacactcccgccaatactaaaaaagaaagcacacacaaaaaaacttcagaaaataagtctgttggttctccaaactatgagatctcaacctacgacaatcctgaatttacatcccgaataacagagcataaaaaggacttaaagcaattttcagaaaaaaagctcttttcagttattcatgataaatggattcaaaaactaagcaaagagcaacagtctttttttagcgaaaatcctaactacgaattactttctatggccaaaggaaatctatttcaggaagacagtaatgattttgtttttatcgtttacgataaaaagaaggtgaaaatttcgattttactctataacggcctaacttctgaatatgctgaattatacaaagacattaaagtcaaaaatggctttgctgacaccgattctgatactagttttttcagaacacttgactatcaatttgcagatgaatttttattttacaatgaagacgctcttaaagaacatcccgataattatttagaaacctatgttgcggctaaaattactgacctttcaaaagacgacgattttgcattagaccatggatcctttgcaaaaaacgtttcgagaaccaatctgtcaaatactctttgccttgctacaagttctgtttatagcaattgggattgcttgcgatatgataaaacaaaccatacttttttaattttttatacacaggccttcgcagactaaatatcccgcttttgtataagaattctaaaaaataaacttttttaagatggccactaaactttcaccgatcctaagccctaaagaattagtacaacgctctaattcacctgaaattattctcattgacgccagagccggaataaacgcagaagaaaattatcgcagtgaacatcttaaaggagcacgttatatcgatttaaacaaggacctagcaaccgtagcgaccgatccttcaaacggcggaagacatcccttaccttccatagagaaattttctgaggtactttctaaagcaggaatttcacctgaaagtcatgtcgtagtttatgatgataaaaacggatcaaacgcggcagcccgcttttggtggatgcttcgggcgataggacatgaaaaagttcaggttttaaatggcggcttacaggaagctgtaaaagcaggttttccagtaaatactgaaatcgaaacttttaaaacgactgaaagatatcctatttcaaactggactttaaaaactgcagacattgaagaagtcgaaaaagcccgaaataacaacgaaaacattgtcattgatgtaagagacaaaaatcgatttgacggtctgacagaacctctggatttgattgcaggacatattccgggtgcgattaatgtcccttttagcgaaaatttagacgctaacggttcttttcaatctcctccatttttacaagagaaatattcccgaatcattggcgacaaagagcctgaaaatataattgtacattgtggctcaggagtcaccgcctgtcatactttgctggccatggattatgccggaatccccatccctaaactatatgtaggttcctggagcgaatggtcgcgcaacgatcgtgaaatggctactaaaccaattgaataatcactttagaatacagaaatgcagcattgggacatacttttatcaaatcaggtcaataaaaaagcttttatagacactatacttttaggggaagccaaaggagaattagccctttttaacactcaaaaaggtattttgttctcagacatcgctatcgagaaattcatcgaaaaagaataccaatacgatactgttgaagcagctcctgaatcgcacagacaactaagaactttttcttcgggcgaacgaaagaaagagtttctgaaatattgcatcaagcaaaatcccgattttatcatttttgataatcccttcgatcatttagatctggcctcacgtgctgctttagcaaaatctctggaaaaattaaccgatgacattgcaatcattcaattggtcaatcgcgtagcagatgtacttgattttgttccgaataaagcatcaattaaagacaattcctttaaactgcatccgatttcaaaaaacgaaaaacattttaaaactttaaacacggcagcaattcccaaagcgattgaaccgcactcttttcacgaaagtgttttaatcaaaatggataaagtctctgtaagttacgaggaaagaaaaattgtcgataacatctcatggacaattaaacaaggggaattctggcaactggttggtccgaacggttccggaaagagcaccctcttgtctctaatcacaggcgataatccaaagggattcggtcaggatttgcatctatttggaagaaaaaaaggaagcggcgaaagtgtttgggacattaaaaagcaaattggaattttcgcaacttctatgactgacctgtttcaaaagggacatactctggaagaaatgattctttccggtttttttgattccatcggattgtatatcgaacccactactttacaaaaacaaacggtaacacagtggctcgaagtaattgaaatgagccacttacgaaaaaaacgcttcattgacctttctataggacagcaaagagtcgctttaattgtcagagccgttctaaaacatcctccgttattgattcttgacgaacctgtcgaaggtcttgacgatgaaaatgttgacttggtcattcaattgatcaacaccatcaaacaagaaacaaatgtgagtatcctatacgtttcacatcgtatagaaaatggcctcgctcctacttcggtatttgaacttttgccaactccaaccggatctatcggtaaaatcaaataccattcagagttaaattaaaaacaaaaatgaaaattaaacatcttacttttctagcatctacaatgctactgatttcctgttcaggtactatttcgactgcgaaaaaagaatatcaaatcacaaaaactgccgcgttaaaatccgcttggaattttaatcccaatgaatggagactccaaaacgataccttaaccggaaacggagggccaatgcattggggtgtgatcgaatcaaaaaagaagcttccaaaaaattacgaaatcgactttaaagtaaacatcgtcaaagaatctttgtttgaagtcatgcttcatatcgatcaggaaaactacattcgaacctacttatacacgatcgatcagaatatcgtgattggaagaggcgcctacaataaaaacagtgatgaatactcgaaacgtggcggaccaaccctgtttaaaaaaccaatgcaactggaaaacaacaaatggtatgcggtaaaaatcagagtttcaaacaatcagttgtactttactgtcaacaatcaaacgttcttagaatgttccattgaaaaaagtaatttaaaccaacaaggaaagttggggttcataaccaacggacacgcaaaaataagccagttaaccattagaacaattccataaaaaaagctccatcaggagctttttttctatagtaaattatctaattttctaatggaccaattatccaattaattttcttcttcatctacattgtgcgttttcacgtaattacgccatttctcaatacaatcctgaaagtcctgaggcagttccgtatcaaaacgcatcatttcacctgtatttggatgtacaaaaccaagtgttttagcatgcagcgcctgacgtggtaatgctttaaaacagttttcgataaactgtttgtacttggtaaacgtggttccttttaaaatcaaatgacctccgtaacgttcgtcattaaacaacggatgcccgatatgtttcatatgagcacgaatctggtgtgttcttccggtttccagtttacaggaaatcaaagtcacataaccaaaacgttccaatactttataatgtgtaatagcaggttttcctatttcaggatctgcaaaaacagccatttgcatgcggtcttttaaatgtctggcaaggtttccttctatcgttcccgattcttcggctacattcccccaaaccagcgcaatatactcgcgttctgaggttttggcttcaaattgtttggccaaatgtgtcattgccgcttcagtttttgccactaccaaaagtccggacgtatccttatcaattcggtgtaccaagcccggacgttcactgctgttcattggcaaattatcaaaatgatgcgccagtgcattcaccagtgttccggtatagtttccgtgccccggatgtaccaccattccaggctctttgttgattaacaacaaagcatcgtcttcatatacaatattcaacggaatatcttccggtaaaatatggttttcaaaaggaggatgcgacaacatcacggtcaccacatcaaacggttttactttataatttgatttaaccggaatatcatttacaaaaatgtttccttcagtagcagcgttctgaattttatttcgcgtcgcattctgaatcaaattcattaaatatttgtcaatacgcaaaagcgcctgacctttagggacttcaaatctgaagtgttcgaataattcgtcttccagatctaaattttcagtattattgctcatcattagttttttcagtagttggcgcagctacactgtctacagcctgcccttcatcttcataagttgcttttccgtctcctaaaaccaagtcaattttagaagctttcagcacacgatctcctacttttaagtttcttcctttataacgcatctccaaaaccatatcttttcctaagtttggaatataagtaatcgttcctgcttcaagccctaaagcttttagcgttggaaccgcctcacgataggttttctcaattaaatcaggtactttaacagaggaaaatcctgatgcattaattttaatatatatttttcttcccacttttacttttgttcccggcagaggatcctgctcaacaacactgtattttgggaattcacttcggtaatcaacgctgtccaaaagtacataatccagatccagttcatccagttttgactctacctgctcctccgttagtttggataaattcggaacagtaatttcattaccatgatcagtggtaaaagtcaaccaatgcataaacagataacccaaaacggcaattatagctgccgcacttaatacttgcacaaaaaatacccggctcgttaaatacttacgtaaactcataaatttatttttattagtcgcaaagataaagctatttcgtttcaaaaaaaatgataattttgttttagacaagaaagtcgtttgattgccattcttatggaaaataaagcgctttgcaattttaatttttagaagctctctcctgctgtccgctgtatcttttgcgtccgctatcgcgtacacaaaaggatgccgctcccatcagggctagggatttaggttttataagaacctttccggtgttacttattcatctcgaaagatagagagtacctgccgctactgtcaaactaagcggattcgaagttctgcaaagtggcttcaactccgctcagtcagacaaacgattaaaacaagtagtgcaattcgcagcaaaaacctgaaacctgaaacttgaaacaaataaacgattaaacaaataaacagttaaacatacttagaagaagtcgaagttctgcaaagtggcttcgactccgcttagccaaacaaacaaacaaacaaacaaacaaacgaacaaagtaattcgtgaaaattagtgcaattcgtggcaaaaaaacgattaaacgattaaacaaataaacagttaaacatataaaaaatgaaaaacatagccattatcatgggcggatattcaagcgaatataaaatttcgttaatcagcggaaacgtggtacatcaatatcttgacaaaacaaaatacaacggattccgtattcatattttcaaagaaaaatgggtttatgtagacgaaaacaacgccgaatttaccattgataaaaacgatttttcagtaaccgtaaacgatcaaaaaattactttcgattgtgttttcaatgccattcacggaactccgggcgaagacggtttaatgcaggcttattttgagttattagggattccgcaatcttcctgcgactactatcaggcagcattaaccttcaacaaacgtgatttattatcggttttaaaaccatacggaatcaaaacggcgatttcgtattacctaaataaaggcgatgtaatccatacggccgaaatcgttaagaaagtaggtttaccatgttttgttaaaccaaacaaagcaggttccagcttcggaatttcaaaagtaaaaacagaagccgaacttccaattgcaatcgaagtagcatacaaagaagacaacgaaatcatcatcgaaagtttccttgacggaaccgaagtttcagtaggagtaatcaattatcagggagaaattaaagttttacctattaccgaaattgtatctgataatgacttcttcgattatgaggctaaatatgaagggaaatcacaggaaattactcctgcacgaatttctgacgaattaactcaaaaagtaagcgaaacagcaaaacgtgcttacgaagtcttaaaaatgaaaggtttctccagaagcgaattcattattgtagacaacgaaccttatatgctcgaaatgaataccattccgggtttaaccaccgaaagtttgattccacagcaagctcacgcagcaggaatttcactggaagatttatttactaatgcgattgagttagctttgtaaaagatgctaagaaactgaggtgctaagattctaagattttagcaccttattttctcaaaaaaaacttagtaccttagcgactcagaaccttagaacctctaaaaaatgcgaaaagccctattccccggatcatttgaccctattacactgggacacgaagacatcatcaaaagaggaattcctttatttgatgaaatcgttattgccattggtgtcaacgccgaaaaaaaatacatgttttcactcgaagaaagaaaacgctttatagaagaaacttttaaagatgaacccaaagtttcagtgatcacttatgaaggattaaccattgatctggctaaaaaacttaaagctaatttcatcctgagaggcttacgcaatcctgccgattttgaattcgaaaaggccattgcacacaccaacagaaaactatctaaaatagaaaccgtatttctattaacagcagcaagtacttcatttattagttcaagcattgttcgtgatgtattacgtcatggcggagaatatgaaatgctggttccggatgcggttagggtgaagaagtaaaatctttgttctttctatttttacctatatttgtaagaaatgaagaaaaacctctacataatcgcaggttgtaatggagctggcaaaaccactacttcttttacaattttaccggatatcctgaattgcaaagaatttgtaaatgcagatgaaatcgctaaaggactctctccttttcaacctgaaaaggtctcatttgaagctggaagaataatgctaaatagaataaatgatctcttaatcattaaagaaaattttgcctttgaaactactttagcaactaaaagttacaaatcaaaaataattgatgcccaaaagaataattatatcgtaactctcctttttttctggctacaaaatgtagatctagcaattgaaagggtaagaacaagagttttagaaggtggccacaatattgaaaccgaaactattcggcgaagatatcaaaatggaataaaaaacttatttgaaatttatcttccaatagttgatgaagtaatgatttttgataattcagtcggaaaacccgaacttatagctgaaaaaaatctggaatctgaaatagatattctaaacaaaattaaattcaataaactaaaacaacactatcatgaaagcctataaaagaacagtaaatcaaaccaaaattttagaagggatggataaagtttatgataaattgattgaattcaaaaaaaagatgaatagcgaaataatcattttgaaggacaataaaatagttcgagttaaaccctaaatttataaagtaatattcatgactaagaaacaatgacacataaaagtcaaatacataaacttgcaagcgaatacaattaaaagtaatttcgcctttttaaaacaaacaataaataatgagtatcgaaagagaattaaataaacgcagcggatctaaatgtgaactttgtggagcagaggaaaacctaaaagtatatcaggtattaccaactcaaaaaggcggaattgaggaagctatatttgcctgcaatacctgtatcgaccaaatcgaaaatccggataatgttgatttaaaccactggagatgtcttaatgacagtatgtggaatgaaaacgttgctgtacaagttgtagcctggagaatgttaagccgtatgcgtgccgcaggttggccacaagaattactggatatgatgtatttagacgaggatactttggcatgggctagcgccactggcgaaggcgaagacgacgaaaataaaatcgttcatcgtgacagtaacggtgttattttagaacacggagattctgtagttctaattaaagatcttaaagtaaaaggatcgagcatggtagccaaacaagggactgccgtacgtaacatccgtttagaccatgaaaacgccgaatacatagaaggaaaagttgacggtcagcaaatcgtgattattacccaatacgtgaagaaaatatagttttttttgaggtgctaagctgctaaggtactgaggtgctaagtttttatagcttttactctcaaaaccacaacctgaaacctgaaacatgaaacttgaaacctgaaacaaatataattttaggaacaaaggttcaaagttacaaagggacaaaggtttctttttgaggtactaaggttctaagatgctgagttgctaagtttttttgcttttactctcaaaaccacaacctgaaacctgaaacttgaaacttgaaacttgaaacaaatataattttaggaacaaaggttcaaagttacaaagggacaaaggtttctttttgaggtactaaggttctaagnnnnnnnnnnnnnnnnnnnnnnnnnnnnnnnnnnnnnnnnnnnnnnnnnnnnnnnnnnnnnnnnnnnnnnnnnnnnnnnnnnnnnnnnnnnnnnnctaagatgctgagttgctaagtttttttgcttttactctcaaaaccacaacctgaaacctgaaacttgaaacaaatatgattttattttaggaacaaaggttcaaagctgcaaagggacaaaggtttctttttgaggtactaaggttctaagatgctgaggtgctaagtttttttgcttttactctcaaaaccacaacctgaaacctgaaacttgaaacctgaaacaaaaaaaacctgaaacttaaaacaacaaaaaaaggctattcaaaatctgaatagccttttttagtgatttacaattaaacctatttttggaataatttattgatctgatcttttacaaatggctcagaaacactgcttgttgcagaagcagcctcttttgaagaaaccatgaactgaaccgtagctttttccggaacaacacttcctgtgtagtgcaaccagatatagttattcggtaattctaatttgatatcatacaaagggcttgccgtgaaaccattcatgataatgttgtaaagactcgcgtaatcattgttaacattcttaaatgtaaattttcttagacttgatgattcatcatcgttttgaatactggtataatacacagtatactcatctccaattttctgaatgtaattgttatttacttttcctaatttttcaaccggtacagtttcaataactttaatttgtgcaaaagacacaacactaaacaacaaaatagcaatcgtaataattcttttcataattaatttggggtttattatttacgggcacaagaaacgcagaaaatatgataaattaaagtcttcgtccttattttttatcacccaataatctcccttaacaagacatctttaaagaacaataaaaacacaaaaaaaaccactgaaaaacaactaattaaaaataaaaacacctcaaaaaacaggattaaaaacatgtaaaatccctattgatttacgataatttcagactcaaaaatttatttaaatgttgaactcttacaaagattgcccttaaaaaacatccgccaaaaaagatagagccggaaagattacctctcctcttctttcttgaccactttgcgggcaacttcaattttgaatttcttgcccttcattttttcgtctttaatattttttagcagatcttttaccttattgtatttaacagccgcaaacgatacaaaatcctttacttcaataagacctaaatcttctttttcaagttttcctttttgagaaaagaaaccaacaatatctattttattcaatttggttttctttccgccactaatataaatggtttgaaattgaggtggttttggcaaaactgtagtgctggcaacctctaaaacctccatcccgtaatcaatataatccagttgtttttcactttcgtgaacaataatataagctgttcctgaagcctgcatacgtgccgtacgaccatttcggtgcgtgaattcatcttcttttaaaggcagatgataatgaatgacgtgtttcatttccggaatatccaatccacgtgcggccaaatcggtagtaatcagataactcatactcccgtttctaaattgaatcagtgcacgctcacgctcctcctgatccattccgccatgataatatgtcgcataaatccctttttcgtttaaagtatcactaatgcgttctgccgcatcacgatgattacagaaaataatagcggactgtgatttcagtgaacagatcaaattaaacaaactgtccagtttatccttagcgggtgaaaccaccattttcatcgaaagattcgtcttttcctcctcttccggaataaaatccaaaacagttggattgacgaccctggtatatcttggaatctcaatatctgaagtcgctgaaaccaaaacacgtttgttcaatttcgttaactttccaataatatatgacatttgctcatgaaaaccaagctgcaaagacttatcaaactcgtccaaaaccaaagtctgaattttatcggtgcggaaagtatcgcggtcaatatgatcggcaattctacccggagttccaatcaaaactgccggaggattgcttaaatttttaatctcagtatcaatagagtgtcctccatagcaaatatttaccttataagaagtccccattttcttccaaacctgctcaatctgcaaacctaattcacgagaaggcactaaaattaaacattgaaccgaaagaatttcaggctgtaacaactctaaaataggcagtaaaaaagctagtgtttttcctgatcctgttggagaaagcagtaaaacattattatcgtttaaaatagcatcctgcgctacctcttgcatttcatttagactctcaattcctaaattcgaaagtatattgttggaatggtgttttttattcattttgcaaaagtagtcaaaatacttttttgtttgaggttttgtttgtttcgggtttcagatcttaactatttgacaattcaaccgcaaagtacgctaagtctttttttaatttagaaagcgttgacaagcgcaaggaacgcaaagctttgcgttccttgcgcttgtataaaaccatgctttacaaaacttagcgtactttgcggttaaaaaaatcaatacattactgttctatttcctttaagatcaacttaaactcttcaatttcagttgcggttaatggttttaacgggcttcttaaaaaaccaccctctattccctgaatttccaaacctgccttgatcgctcgtggcaaacctttgttaacgataaacttcaaaagattcaattgtttgtaaaatactttttgcgcagtctctaaatcattgttctcaatcgcatgatacaaatccagattcaatttcggaattaaattgggcgcagccgtacaccaccccatagctcctgcagaaaatgcagccagtgccaatggatttgaaccgttaaaaaaagcaacatcatcgcccaattcccgctttaaataatgcattctctgaacatctcccgtgctttcttttatcagggttacattagcaatctcaagaagtctttttaataaagttggcgacatatctactcccccggttgcaggattattgtaagccattatcggaatcgaaatttgcttcgctactacatcaaaatgctgaacaatctcgtcatctgtaagcttccagtaactcatcgggataatcattacggcagcggcacctgctttttcggcaaacttagcgtgataaatggttttctcagtagtcaggtttgaaacgccaaccaaaaccggaactctgcccctgacctgttcgattgttgccacagtaatagcttctttttcctcatctgacaaataaggcataactccggtgcttccaagcggggcaacagcgtgacaacccgaaacaattaaacgttccagtaattttttatataaagcgatatctactttttcatttttatcgaatggagtaatcggataagcaataatgcccttgaatagattgtttttcatgtttttcaattgttttaaattaaagatccctgccttcttcttctcttaatgccacacctaaattctgaagctgcggtgcattctcgcaagcaatatatttcgccgatgcttcgctgcttagattttgatgcctgtgccacgcccaactcggaatgtaaacagcatcgcctgctttccactctacttttatatcctcaatctcagtatacccatgcccttcaattacataaataacggtttcatacgtatgacgatgtttgtttgtcaattgatccggtaataaaccgccaattgtcatactcacgtttttacttggaagatccacgaagaaaaccgggtgttttcgctcggtagaaaattggttgtgaactccggcttgctctacgtttttgtgaattaatttttcaggcatcacaaaagtgggtctggcaaaagtttcgtgaaaatcttttgaagaaaattgttttttagtttccataactttaataattattgtgttttgcattattgctccacaaaattatcttaactttggactactcaactgatacagttttaacataaacaaatagtccagatgttacgaccttggcaattagaaattcaactcaacgcaaatgatgcaaaagccatttatctgcaaatcgctgatgcaatcatcgaagccattcaaaccggaatgctcaacagcgggaatgcactgcccggcagccgacagcttgctggcttgctcaaagtgaaccgaaatactgttattgaagctttagacgtcttaatcgccgaaggctggctcattacattggaaaggaaaggaactttcgtagccgatattctgccattggcttccaaaagtatcgatcaaaaacaaaaaacaaactataccgaagaagaaaaacagcctcttatcatttttgatgatggaatccccgatagtcgaattgcaccaatgaacgaactcgccagagcttaccgacagatttttaaccgaaaatcgcgttggcagatcatgggatacagtaccgagtacggaaatctggaatttcgaaaagcaattgtgcaaatgctcaattttaaaaggggaatgaatgtcactccggatcaaatttgcatcacacgtggaagccagatggcaatgtacctaacctccacctgtttactatcaaaagacgattacgtaatggtcgaaaacccggggtatcaggccgcttgggaaacatttcaaagcagtggagctaaattactgccaataaatgtcgacaaagacggcttgctgactgatgaggtcgaagcttatctgaaaaaattcaacaacataaaagccatatacgtaacaccgcatcatcaatttccaactacggttaccctgagtctcaaacgaagattaaaactcatcgaattgtccaatcaatacggctttaccattatcgaagacgattacgatcatgaatttcatttcggacaaagacctattcttcctatttcaagttacatcaatgccaaaaacacggtttatattggcactctaagcaaaattgttgcacccgccttacgaatcggatatttggtaagtgatcgcgaaaccattttaaaagtgggtaaacaccgaaaaataattgatgtacaaggtgataacattatggaagaagccgttttacagctcataaacgaaggagagattaaaagacatcttaaacgaacaacccttatttacaaagcaaaacgcgactattttgaaacgatttgcaacaaatacctcaaagacaaaaccacttttaccaaacccgaaggaggcctggcattttggataattcctaactcgccagttaatatttctcaaattgcggacaaactgctgttaaaaggaatcaaaataataacaccagagaaattcagttttaaccagcctgtgcaaggatttaggcttggttatgcctccttaaccgaaaaacaaatcgaagacggcataatcgaacttgcgaaatatttgtaattattaaatttaaccgcaaagtgcgcaaagatttaagcaaagtgcgcaaagttatgtacacaaagctttgcgaactttgcgtttatcaacacaatccgatacaaaaaactttgcgcactttgcggtaaaaatcaacgcaaagcacaatcacacatcaaacttgaaacctgaaacaaaccaaaacttgaaactaaatttagctatatttgattcttgctaacaaaaccaaaaccatgaaactttttacatttctcttttcacttttcaccctaacccttttcgctcaaaacaataaaaaatacgagactttctttgaaaaaggaaatggaaatcagtccgcttcgtatcaagaaacgattcactattacaaacttttagcaagtgattttgcgacaattcaaattaaagaaatgggactaaccgactccggtgagccattgcacatgattacttacaatcctgaaaaagaatttgactttgagaaaattcaaaagaacaaagcggtactttttatcaataatggtattcatgccggagaacctgatggaatcgatgccaccatgcaattctacagagatctggcaacaggaaagataaaagccccgaaaaataccgttttggttacgattccggtttataatattggcggcgctttgaaccgaaattcgaccacaagagccaatcaggatggtccggaaatttatggtttcagaggaaatgcccgcaactacgacctcaatcgtgatttaatgaaatcagatacgcgaaacaccaaaagctttgttgagatttttcagaaaataaacccggacgtttttattgacaatcacgtgagcaacggttctgattatcaatacaaattaacctatatcatgacacagcacaacaaactgggaaccgtattgggtgattttatgaatagcgaaatgatgccggctctagttaaagatctacaacaaaagaaagttgaaacaacaccatacgtagattcatttaaagatactcccgacaaaggttttggtcaatttgtggatagtccacgatacacaacgggttatacttcactattcaacaccattggttttgtggttgaaacgcacatgctaaaaaaatatgccgaacgtgtaaaaatgacttacgaatacaccaaatctactttagactacaccgattccaattacctaaagatcaaggaacttcgagtaaaaaatctggaacaatatcaagctaagaaaaactatactctaaaatgggagctggacagtacaaaagccactaccttttcgttcttgggttatgaagcagcttacaaaaaaagcgaggctacaaccggaaatcgcttgtactacgatcgaagcaaaccgtataaaaaagacgtccgttatatcaaagaattcaaatcagtaaaagaggttgttataccttctgcttatatcattccgcgtggttactggaacattattgaccttttaaagaacaataatatctcgttttccaaacttaaaaacgacaccatcattgaaatagaaagctacaaaattgccgattttaaaaccgttccgtctgcctacgaaggtcactatttacaccgaaatacaacggtaacttctaaaattgttaaaatggctttcgccaaaggagattacatcattccaaccaatcaaaaaggtgtaaaatatatcctggaagcctttgaaccagaaggcgttgattcgtttttcaactggaatttcttcgatactattttacaacaaaaagaacactattccaattatatttttgaagatactgctgccaaactcctaaaagaaaacccaactttaaaagcagaactggaaaacaaaaaacagactgatcctgaatttgctaaaaatccggaggcgcaattggattggatttataaacattcagcttattatgaaaaggcgcatttgcagtatcctgtttataggattttatagatttttttgtcttttatggttttctgtaaaatatcacaataataatcttataaatttgaaaaaattattagtttatataaaaagtaatttaaatcaaatgagaaaagaagaatttttaaacacattagctcaaaaaggatacgatataggatttggtgcgaaaaaaaacttttcatcttatgatattattaacaaactccctagctggataggttttatatcactagcagttgggatagttcaaattgcatatgaaaatattcctttgaataaagaactttcaatcttactaatttttgctggtattgctataatatatttagaagcattcaagagtaaaacaagtgaattcgagactgaaggcattagactaacaagatcatttaattctataagagttttacaggtgcgcaaaaataccaaaattgattgttcttttgatgaaaaaaaataaattccaaaaatgaaactttaaattttaaatcttcggtacttttagatgtaaaaattagattggaaattcaaaagtattacaagaacttaatcgtaataacatctctgtaatttaatcctaaaaggctattcgctgaacccactttagaaggattgcttctaaaaatggcgatttcaaggaatccggcttcgttaaaaatagccagtttctctccttcgtaagtttttatggggtatttatcagagctggcaatggcagagtaattgggtaaaatggctttgatacttttgggtttcataacaatttcataggcccgaccttttgcaacttctgtaaactgcctttttgaaatgttggttaccacgttcccgaaatgatcaatgtaaatcacgtatccttttatagagttgttgtcgccggcaactacgggctgtaactctgtaatttgcttgatttctttaatttctttgccaataacattaagtaagccccctttggaaatgtgacaggcgaccttaataaaaatatccaaatcgctaaattcgctcggaaagcggtcgtgtatgttgatggcaacaattttttgcggaacaattttctgcgtaagcatactcagaataccattatcggcacaaataaagtaatgatcgttccattgcatggcaatatgctgattttctttattacgttcgatatctactccaattaagtgaacggttccttttgggaaactcaaatacgaagcgccaataacgtaacttgcttcggctgtgttaaatgggtcaatgtcatgcgaaatgtcaacaagtgtaacctctggatactcagataatattttaccctttagcgaaccaacaaagtggtcttttaagccgtaatcggtagtgagggtaattattgacataattttgtttataactattggtagtatttaaatctaattttcattaaatttgagaaatgcaaagctagtaatagtaattgcaaaaaggaagaaatgaaaagacaaattgcaattattggcctgagttttcagtctcggtcacgccagccgaaaactccagccgagactgcgacgaaaaaaagacccgacaactactgatttataaaaactgatttatttttaatttaaaactatctcatttgaacgaaagaattattgagctcatagacatcgctccaaaagacttttggggtgctcaggatacgcatcttgaaatcattaaaaagtattacccaaagcttaaaatagtagcgagagggaccactttgaaggcatttggcgagaaagaagttttagatgaattcgaaaaaagattccagaggcttatgcttcattttacccgatacaataacattgacgataatgtgatcgaacgggtaattatgagcgatggacaagatgaaaaaaaagcatacgatcatgacaaaatattagttcatggtgttggcggtaaaatcattaaagccatgacgcctaaccagcagttattggtagataccatcaaaaaaaatgatatggtatttgccgttggacctgccggaaccggaaaaacgtacacaggtgttgcaatggcggtaaaagcacttaaagacaaagaggtaaaaaggatcatattgacacgaccggcggtagaagcaggggaaaacctgggatttttacccggcgatatgaaagaaaaattggatccttatatgcagcctctttatgatgcgttgcgcgacatgcttcccaacgaaaaactcgaagactacattttgaaaggaattattcagattgcgccattagcctttatgcgtgggcgtacacttgataatgcttttgtaattctggatgaggcacagaacacgacacattcacaaatgaaaatgttcctgacccgtatgggaaaaaatgccaaatttatgattacaggtgatcccggacaggtcgatttgccacgcagaactatttccggtctgaaggaagcgcttttggtactgaaagacattgaaggtatcggaattatttatctcgatgataaagatatcgtacgtcaccgattagtcaaaaaagtaattgacgcttacaagcagatcgaaaatcacgactaagtttaattatagtgaaatgttaaatgtaaatcgtaaaatgtgttttaacatttagtaatattcgttttatacctaatctttaataggagaggtgtaaaacgaatatttttttaatttaaggtatgcaggttttaaattaaatagggaatgaaagaagttgacaatttttacgaaaaacttgaagaacccgggaaaggagtctttttggccttaaaagagattatcttaagacaggacaaagaggttactcatgttttaaaatatgggatgcctttcttctgttacaaaggaaaaatgttttgttacttatggacgcataaaaaatacaaaaagccgtatattggaattgtagaaggaaaacactttgatgaaccttttttacttcaagaagcccgatccagaatgaaaattatgctttttgatcctgaagaagatttacctgtagaaagaattgaacaaattatagaacaagccctccatttatacaaaaccggaattattaaagtttgaatatttaaactggaatagttaacgtaatagttaaatatataataaacttgctgtttttgaagttttcgaagactgtaatttttgttcttctgcaagcaaagccgtaattttgtcattcataaatacctgaattttaatatgacgaaacttaaaaatataaaagttgtagtaaccgatttagacggaacgttactcaaccctcaacacagaatatcagactataccaaatccatttttcaggaacttcaccatcaaaattatcttattgtcgtagctacaggccgtcatcatttagatgcgatggctattattaaaacacttgaaattcccgtttatttggtgagctcaaacggagcaaggattcattctcctgaaagagaagagctttttgcgtttgatttaaaaagtgatgtggtaaaagcggctttagatgtcgagattgatcctgaaattacagtggttttattcaaagaaaacgtttggcagacgaatagaattaatgagcgactaaatgcttttcaggccgaattaaaataccgtcctgaattggtagattataaaacgctggaagattttgcagccattaaaattttcttctcgcatgagaatcatgaaaaactggtagccctaaaagaggcaattttggcaaattcagccagtgatttacatcatgcatttagcttgccaacctgtttggagttcatggacaaatcggttgataaggctgtggcaattgagcgtgttttagaaaaagaaggattttctttagaagaggcagtctcttttggtgatggttttaacgatgtgcaaatgttagctgcaaccggaaaaggtttaattatgggtaatgctccggccttactaaaagaaaatttgcctgacttggaggtaattaaaaccaatgcagaagacggtgttgccaattacatcgcttctaagattttgaataaagaattcgtaatggattaaaaataagaatttgctgtattgttttaaactttaaacagttttacaatcaaagaatctgaaagtcttcaaaataggttttgaaggcttttttttatctctttgaacgattggctgtttgaagttgtaaaaacatttttttagtaagtttcaaagtgtatttttgttttatcaaaaaactataccatgacaaaaaacatctttattcttgccttttttatgctatcgatctcgggcaatacccaaactctgaaattagaagaaataatgaaaggggaaggttttactggaaatcaacccacttacggacgctggtctttagacggtaaaaaagtatatttcgaatggaatccaaccaatgatttgggcgcaaatacctattcctggcaaaaaggagcagcaaagccaactttggtagagccaaaagaagctgctttttctaagctggattttaaaagaaaaccaacttcagacgtagtgtattacagtgacaaaggaggtttgtactcgtattccatcagtacaaaaacagttaagaaaattattcagcaaagcactccggtatccaatgttgaacttggtgcggctgcagggattgttttctttgaacagaatgataacattttcaagtacaatgcaaaagaaggagctgttttgcagttaacaaattttaaaaaaggagtaaaaaaggaaaaaacacctgataaagagtccttcttaaagacacaacaaaaagaactgtttcagttcgtgagagatgctgcggctaaaaaacaatggaatcttgccaaaagcaaagccgttaaatctgattttgcaaaagaatatttttatggaaaagacaacttttacaatttaaaagcagatccaaacggaaattttgccacttttagtttggtggaagaatcagacaataaaaaagaaaaaatggaggtttttataacagatgatggttataaccaaactcctgatacaaaaggaaaagtgtcgacagccaatctggtaaagactaaattgggaatttactctgttgccaaagacacggtttattacgttaatttttcgactttaagccatattcaggacaatccgaagtattatgaaacgtacgataacttaaaaaataaagctaaggaagatcgtttcatttctgctcaggctcctgtgtataacgagagtggttctgcagcaattgtagaaatcagaagtcaggacaacaaagacagatggctggtgaatctgaatcttgagaacgggacgtttaaagaaatcgaacatcagcatgacgatgcatggatcgcgggtcctggaattccatcctattcatttgattccggagttttaggctttttagcagacaatgaaactgtttatttccaatctgaggcgacaggttattcacatttgtacacgtataatttaaaatcagggaaaaagactcaattgactacaggaaattgggaagttcgtgatgtagccttgtctaacgataaaaaaacattttatttaacaaccaataccacacatccggggaatagaaatttctataaattgcctgcagcaggtggtgctttagagcctgttttaaccaaagacggagcacatgaagtagtggtttctccggacgagaaatcgcttttagtacgttattcgtataaaaatattccttgggatttttatattgctgacaataaaaagaatgcgagtttacagcaaatatcatcttcagtttctgcaagttttaaagaatacaagtggagagaaccggaagtaatcactttcaaagctcaggatggaactccagtaaacgccagattatacactccaaaaacggaaaatgccaacaaagcggcaatcatttttgttcacggagcaggttatttgcaaaatgcgcacaattattggagtaattatcacagagaatatatgttccataatttattgactgatttagggtatacagttttggatatcgattacagaggaagtgatggttacggacgtgatttcagaaccggaatttaccgttttatgggaggaaaagatttgtctgatcatttagatggaaaaaaatatttggttgaaaaatacggtatagacgccaatagagtaggtatttatggaggatcttacggcggttttattactttaatgggaatgttgactgctccgggtgaatttgcctcaggagctgccttacgttctgttacggattgggcacattacaatcacggatataccggaaacattttgaactttcctgaaacagatccggaagccttcaaaaaaagctctcctatttattatgccgataatctaaaaggaaatttagtgatgttacacggaatggtagacgataatgttgaatacaaagacattgttcgtttgtctcaacgttttatagaacttcagaaaaagaattggagtctggcatcatttcctgtggaagctcacggatttaaagagacctattcctggattgacgaatacagcaggattttaaacttgtttaattcgacattattgaagaagtagtttttagttttcagtcacagttttcagtctcggtcttcctagtgcaaactgagagaactgtacactgcgactgaaaactgagactaaaaatgcgactgagaccgtaactaaaaaaaagaatctgaataggttctttttttcttttaattagttttaaatttgcattcataaaaaacaacacaacactagataatgagtaatacaatcacaactacaaacttcaatttcccaaatcagaaatcggtttatcgcggaaaagtaagagaggtttacaacatcaatgacgatcttttagtaatggtagcaaccgacagactttcggcttttgatgtggttctgccaaaaggaattccgtataaagggcaaattttgaatcagattgctacaaagttcatggagttaactcaggatattgtaccaaattggctgattgccactccggacccaaatgtagctgtgggacatttatgcgagccttttaaagtagaaatggtgattcgcggttatgtttcaggacacgctgcacgtgaatatgcagccggaaaaagacaaatttgcggagttacaatggcagaaggtctaaaagagaacgataaatttccagagccaattattacgcctactacaaaagcagataacgggtctcatgatgaagatatttcacgcgaagacattttggcaaaaggaattgtttctgaagaagattatcttgttttagaaaagtatactcgtgatttgtttcaaagaggtactgaaattgcggcaagccgtggtttaattttggtagatactaaatatgagtttgggaaaacaaaagaaggtgtaatcgttttaattgacgaaattcatacaccggattcttcccgttacttttatgcggatggatatcaggaaagacaggaaaaaggagaggagcaaaaacaattgtctaaagaatttgtacgccgctggttgatcgaaaacggttttcaagggcaggaaggacagcaaattccgaatatgagtgacgaatatattcaatctgtttctgaaagatacattgaattgtatgaaaatattctgggagaaaagttcgtaaaagcagatattgatcatattgatcagcgtatcaataaaaatgtagtagaatatctttccctaaaataataaattattaatccgacaggcttttaaaacctgtcggatttaatttataatggattaggtcaatttttattcttccattttggcttttaaattttccagacctttctgcaggtcattgccaatcatttggtccattttcatcatcggcagcataatattcatcggataaggaataacaccgctgattccccattttacttttgtttgatttcccggtgcagtctccgttgacataaaacctaccgctgtatcgtccattggttttttgaaacgtaaggcaaagtcaatgcgttttccctccgtaatttttgtgatttcctgttcaccttcaccaacttcttttactgtgctttcccaggcagatactgatccaacatctccatcggttcctttataagtagatttcattttgggatcgagattggcccaaacactaaattcattttgattttttaaagatcggacatatttaaagacactgtcaacaggtttgttaatggtgatttctctttctatggcataagttttaggcataaaattagctgcaatcagtacgatagcaacgatcaggattaaaacaattagaattctttttaagatcttcatagtttgtggttttaggttgttagttttttcttttctgtaattaaaagtgtaacacctttgtttgcagagttttttgtttcgtaaagttaaaaaagttacgcttcgtatttaatgctatgaaaaaaaataataagattttttatatttttttgctgtaaactgtaacaaattgaatcttctggcgtctattaagaaagctgacaattaacattcaaattactttatccagcttatattaattgaatgttaagaattagttaaaacatggtactttgttatgcataatacatgaaaatgaattacctttacaaagaatttaaaaatcatcatcaatcaatcaattaaaaaatcaatcattatgaaaaattcaatcgtttatttaggagtagctttagtagcatttgcaaatgtttcaatggcatcgaatcacacaacagtagtgaaaccacaattagagatcgtaaacagtttctcaacaccattaaatgtggcagttagtaaaggagatttagatttcgttaaaaaattattagaatatggagctgacgtaaacgagatgtcagaaggtttatcacctttaatgatcgctgcacgttataataaagtagatattttgaaagtattattagcaaaaggagcagatgcttcagttagaaatgagaaaggttttactgctttgaaatatgcagaattattgaatgcgatagctgcaatagccattttaaaaggtttaaaataagagtttaaaagtttaaatctagttttgagttagtatatgaaacgaccttccttgagcagaaggtcgtttttcatttccatgaaattagaatttggttagaaagagctctggcgataatatgatgctgctagaaatgagaaaggttttactggctttgaaatatgcagaattattgaatgcgatagctgcaatagccattttaaaaggtttaaatctagttttgagttagtatatgaaacgaccttccttgagcagaaggtcgttttcattttcgtgaaattagaatttgctctgaaagagctctggcaatagcatggtgctttgaaatatacagagttatcaaatgcgatagatgcggtagccattttaaaaaaattaaatctagctttgagttagtatatgaaacgaccttccttgagcagaaggtcgtttttcatttttgtgaaattagaatttgctctgaaagagctcttgcaatagaatggtgcgcagcactatgaataataatggaatcaggggttacgccctgaaagggcaaaagcctgtccgcaaagaaaagttttttagctctttttttgtattttggttcttgacccaaacattgtttcgtcctgaaataacatttcataaaaaaaagcaccattaaaaataatgatgcttttttcgctaaaacggaatcaaattaatttaaccaattaatctatcttcaatatttttattcaattggaacgtgttttttgcgattgaatacccagaagattataggaaataccaaaagggtcagaatcgttgctgtaattaaacctccaatgattacaatggccaacggtttttgtgattcagaaccaattccggtagaaatggccgccggcattaaacctattgaagccatcagcgcggtcatcacaacagctcttgttcgggcttttactcccataaaaatggattcttcgagggagaatttcgcttttaaattatgatggaattcagagatcagaattacaccgttttgaatacagattcccagtaatgcgataaaaccaacaccagcagagattccaaaattcattcgggtaagatgcaaggcaatgattccgccaataatggcgaacggaacattagccagaaccaaaagcgaatctttaatatttccaaacagaatgaataagagcacaaatatcccaattaaactgatcggtactacctgagccaatcgggcactggcacgaacctgattttcaaattcccctgtccagccaacagtatagcctgttggaagtttcaacttagctacttttgcctgtgcttcggcaatggtacttcccagatcccgatcacgaaccgagaattttaccccaataaaacgtttcgtattatctcgatagataaaagcaggacctgtaatagtctttaaatcggatatttcttttaatggaatcttaattccgctaatcgttggaaccttaagttcggcaatatcattctcatctttacgatactcttttgaaaaacgtactctcacatcaaattttttgtcgtcttcatatttttgagtagctgtttttcctccaaaagccaattctagaacggcttgcgcatcactcagtgttacaccgtaagcagccattttatctctgtccagaacaacactaatttcaggctgtccaacatttcgcaggattccggcatctttaatacccggaatgtttttgatttgtgccaagacttcatttgatagttcatccagtttgtcaagatcatctccataaatttttacggcattcgaggctttaaaaccggcaacagattcggctacgttatcaattacgggctgcgagtagttataggtaattccctgatgaacttttaatttatcgtccatttcgttaattagttcgtccattgttatttttcgcttccattctgatttgggctttaaatccacctgaagctgtataaacccgaaaccattcggatctgttccgtcattacttcttccggtttgtgacaaaacatttttaacttcaggaaaactttccaaatcttttcgaatcatcgcggcagttttaacactttcaggtaatgaggtactcataggtaactcggccgtaacccataaagcaccttcatttaactgaggtaaaaattcggttcctaaaaaggtagctgaaaagaaaaccgttactaaaagcgctatagaccctacaagtgcttttaccttgtgtttgaaagtccatgcaaaacctttactcactattcgatcccagaaattaacaaatgggttgtttttttccttcacattcttattcaataaaatatgtgataaaacaggtaccaaggttagcgtaaacagcaaggctcccattaaagcaaaaccaagggtatacgccaaaggtgagaacatttttccttctactttctggaaagagaatatagggagcaaggctgtgataataattaacttagaaaagaatatggctttacccatttctgctccggttttttttatcagacttccttttgctattttattgtaggccgtcattcccagttgatgtgcccgatgatctaagacgacgaataatccttcgaccataactaccgcaccatcaataataattccgaaatcgaccgcacctaaactcaaaaggttagcgctcattcccatcattttaagacataaaaaggcaaataataaggagagtggaataacaatagaaacggtgaaagtagtcctccagtcggccatgaacaaaaatactacacaggtaaccagaatgattccttcaaataagttgtgcataacggtttccgtcgtgaagttcattaaattatcacgatcataaaaggttactagtttaatgtcttttggaagcacattatcgtttaggtcttgtattttggctttaatcagagccagggtttcctgtggattttcaccttttctcatgacgataataccttcaacaacatcatcgttcttcgctaaaccggtttgcccgactctcggcatcgcactttcataaacagtggccagattcttgactaaaataggatttccgttagcatcgtctacaataatattttcgagatcctgaatcgattttaaaagaccaaccccacgaacaacaaaggcctgaccatttttttcgatgatgtcaccaccaacattcaggttgcctccatttacagcattataaacctgaagaggtgttatgttgtatttggctagttttatcggatcaactccaacttcgtaggttttagtttgtccaccaaaaacatttagatcggcaacaccgggaacagaacgtaattgtttgtctattacccagttttgataagttaacaattctctactgtctctgctgtcactttttacgatatatctgaaaatctcacccgttggtccataaggcggttgaacatccggttctacatcgtcgggaagagatacattttttagtaagttattgacctgaagacgtgcaaaagtatcatcgaccccatcgtcaaaaataattttgatcactgacagaccaaacattgtaatactgcgaacgctggttttcttctgtaccgagttcatcgagatctcgataggagaggttacaaagcgctctacttcttcggcactttttccattccattgggtaatgataataatttgggtattggttacgtccggaaaagcatcgattggcatattcttgaaagaaatgaatcctgctacggccaataatcccacccagaaaaaggtaaatgccttattttttagggagaaagctataatgtttcttatgaatttgttcattttaaaaagtatttttaaggatgaatttttatttgtgatgcttttttctgaagcattttatatgatatacttccgcttagaattctgtatgaaaacgcaaggcgaaaaattgtaccggacctctgtctttattataggcaggattgatggcaaactgataatccggcgaaagcgtaatatgggtattgggtactaagaacgaatagaaaacttctgcgatttgctctataccgtagtttaaagtaccgtcaccgatcatgaaaccatctcctccaagtttttgatattgtttatgtgaattggataatccgttagctactatggcaataccggcaaagtccttatttcggttccacatctttccgttcaaatgcattcctaactgtgccgatcggtcaatttcggtaaaggcccacgtctcatttttaccgtcattatagctcattcgggcaaacaatccccaagtatctttgtgcgtataatccatgtttaaaccaatgccatatttggtgcgcccattttgcctggtattttttatgtcgggcattgttataaaatttgaattggcttcgtcgtaattccccattcctgcaacatttcgaaagcctaatagttttaaggttgccgtatcattatttttaaagacgagctgtttttcaatttcaacgtttattgcgttggaatttttaaaactaaattcaacattcggaccgttggcataagtgggtaaagcagttaatgaagctcttacctgccaggaatcaaactgataattagcatacaatccatctgtatatccccgggtatttgcggcataatcccaagctccatgtgtcattaatgcccagtttaagaattgtgttctgggatcgtgtgagtaggagttattgtcaaaatagtcggctagcccaaattttccgaaaaccagttgtaatgagtggttgtttttaaattgaaacttttgttcaaaaagcattcttgccacataaacaacgggtttggtatctccaattctaaaggtttccccgtttggaaagcctcccaatcctcttgcctgagacaaaccttgacctcctgacatttcagggttaaaagtcaaggtagctcctttccatagtggaacatcaaggtataaggttgatgttaaggataaagcgccttcttctttaggagacatactattggtacctgaataattagcatgaaaagccggatggtactggtatatagaggtcatttggaaccccagactatattttcgaatcgaatctgtttcctgtgaaaaagatagtgttgaaataaatagtgtggcaaaactcaatatttttacagatttctccatgtatttattcgtttagagcgcgataaataaataactgattagtggtaattactttttcattgtcttttaaaccttttgaaatataggttacatcaccaacgactctgtatacgtctacttgtctggtctcaatgttgttgcggtctttgaaaatcatgacaaagtttttactcttatcaaaaacaattgctttactgggtacggctatcatagaatcaccttcactgtaagatagtttgatattggcattcatatcaggttttaacatgtaacccggatttgacagttttatacgtgcctgcatggcttttgtttcgggatcaattacattaaagattttatctacttttcctttgaaaactttatcaggataacttagcgtggttacatcagcatcgatgcccagttttactttgttgatatcaatttcgttgatgttggctaacgcccaaacttcactgatttcggcaatatcaaagatgttttcggaacggtcatttcgcagtaacatgtcctgattaatgcttttttgaatgataaaaccgctaattggggccgttacttcgtaaatagaacctgctttgatattgtaaattttataggtttcctgaactttactcaattgcgattgtgctttattgacttctgatttcgcctgaagtacatcactttcagagtttaattttccgtcaaataattcctgagctactttcagatgatttttggcaaccagtaaatcattttttgcatcaatggattgtttttcaaaatcagcaatgtcagtactttttatggtggccaaaacctgacctttgcggacataatctccgagttcgacatttactttgattacgtttccgcctacgagaggataaacatcaatcattttgttattatcagccgtaatttttccgtaaaagctcaatacattttttaccggttgcgttttcgcttctgctgtagtagtcgttttaagcatcgattcgcttaaggcaaaagaggtattagtgcttgggttttcaacttcttttttgcagcttaggactgataaacttacgagaacaattcctattagtagtttatatttcattttatttaattttagaataagtctttgttgatggtactatttagttcttcacccgaaaggataacttttttcttgagttcatttacctgaacagaagcctgattgtaactttccataaaatcggtaaattctaataaactgatatttcgtttctggaaattggtcaagattcctttataaaccgcttcaaaatctgaattaacagtaggttttatgatcacatagtttttacgggattcttcccatttgttccatgcagttgtaatttcggtttgcaattgaaggtcaaaattttgcttttcaattttggactgctcgagaatcgttttcgcatacttgatatttcctttgtttttgttccaaaggggtagcggaattcctagtgtcagattggcttctctgttaaaagctccactgcgctgatcgtaagtggcaccaacggtgatatcaggaacggaaagggatttttgccattttacattgatttcgtttgcctcaatatctttttgtttggctaaatagtccgggcgatttgcaatggcttcatcctgaaatgttttaaggtcaaaaggaattgttttggtatacttattaaattcttccttagtaacttccggaacaacattttcggtggaatttagcagtaattttaagttaccctgttcttcgatattttcattgacaacctccatacgctcatttttgaagtttaagtaaagcgattgcagacgaacaagatctcgtaaaggaatattacctttttcaacctgtatcgagtacgagcttatcaaatcttcgatatgcgctagctggttgtcagtagtttcaagactttttttgttgtagtatacggtgtaaaagctctttcttagttggagttttaaagttctcagtaaatcattgaactgtaactcggctaattgttcattggtttgtgccagttttatttcattgcgtttttttccgcctaaataaatcaactgctcgataccaaatgctttttgcccttgcttgccgatatcaaaatattgatttctttcggggttgtaagcattgagttctgccgttagtgacggattatcccaaattcgggcttggatggttaatgcttttgatgcatcaatattatattgtgatgccaacagaaagaggttgtttttaaggaattggctttcacagtcctgaaggctgaccgttttttgagccaaaactaccggaccgataagtacaagtaggaatgcacagagttttctcattgtatcaattttaatttatacaaatatgctatcacgggactttaagagaccttaaaatctaccttaaaaataacttaaaataaattactaatgaaaaaacaattgaaataaattcgtgttaatatctggaacactgtaggttattgacgcattatgaagtgtgagaatgcgatgaacaatccttaatccaagaccaaagccagtagtgcctttcgagtttttaccacgcataaaaggctgaaaaagatttttttgttcttcttcgtttaaggtttgccctgtgtttgaaatggagatgactaattgatcatccttagtacttataattactttggcttgtttgttatcagaataaacacaggcattttttaggatattggttatggcaatttccaacaagtttttattaccatttatctctaaagcggtatccagattgttgctttcttctatttcaaataaaattagaaactccggataacttttattcagattttcgatagccgaaaacaaaatttcatccatacgatgaacttctttgttttcatttttcttattgtctattttagaaaggatcaatagcgaattaattaattcagtcaattgattgatgtcagacaatatcgtttttagaaagctttttcctttgtcggatgttgttggatctgcaatggtgttttcaatctgcgaggtaattctggagaggggagttctcagctcatgtgaggcatgggccgtaaattctttttgtttttgatacgaaacttcaattcgatccatcatgaaattaaattcattggcgatcagatcaatttcatttttgttgttttttgaagcaacacgggtatcgagattgttttcgttgatattctttatcttttggtggaaaatattcaacggactcatagcttttttaaccatgaaagaggtgagaacccagcagatacaggtaaaaaagatataggaaataattagcgtataccttaggaaaagtaattttcgtttgccataatcgtcggtggcagatatcagggcataaaaatcccggtcttttgtatcataaaaaacaccatatacttcgtaatcaccctgctgtttaaagaatgttttatgttttctaaggtatttcagatcttcaactgaccaattaatcttggcatcgtcaatactactgtagatgagtttgaagtttgaatcaaagaccagtgttttctcatcatacaattggttaatggaattctgatcaataacttttaaaagctgatcgtcgacctctttaacgttaacgagaagtttaatgttggaaagagctttaatttcgagtcgatcacgaaattcttcttttctgaaattcgagtataaaacaaatatcaaggtagaagccaatccgaaaaggatggtaaataataaacttactaaaagtgatattcggttttttaaagtcattcctgatcgctcaaataatatccgtagcccactttggtacgaataagtttaacagtatgatccttgtcgattttctttcttaaaaaattaatataaacttcaatagtattttgattggtttcgatgtgataatcccagagtttttcggcaataaattgtttcgataagactttacctttggcatgggctaagattaaaatgagcttgaattctttgggagtaagtttgatttcttctttagatcgaaatactttcatatcgctttccagaatttccagatcagcaatcgttattttagtttctacctgttgtggaatttcttttcgacgtagtagagaagtgcttcgggcatacagttccttaaaatgaaagggtttaacaagataatcatcggctccattatcaaaagaagctaatttatcctcaatttcactaaaagcagtgagcataataatcggagtctttttatcgacttcccgaatacttttacacacttcaattccgttacttccgggaacattaatatccagaataattaaatcatattcataggggaaatacttcttcagcagtaatgaaccatcataataagaaaaacactcgaatccatttgaagtaaagaatgcagagatttctttcgataaggtaaaatcgtcttcaagaaggagtattttcatagtgttttgtttgagttatgagttgtgagttgtgagttgtgagttgtgagttatgtgttaaggggattagtccgttgtttttacattttacaactcacatcttactttttactttaattttttattaacaaggaactaggcacttagaactaagcactaatcactaattaccaattactaagaactaattactaagaactaattactaagaactaattactaagaactaattactaagaactaatcaccaaactagttaaaataagaaaaagtttcgttgttctcaattttcagtaaggattcgtaaatcaattgaattacattttcaacatcctctctttgtaccatttctacggtagtatgcatataacgtaaaggcaaggaaattaatgctgaagccacaccgccattactgtaagcaaaagcatcagtatctgttccggtagcacgagatgttgcatgacgctgaaacggaatttttttctcttcggcagtatctacaatgaggtcacgcaatttattttgtacagccggggcataagcaattacaggtcctttccccattttcagatctccttccacttttttatcaatcattggagtagtggtatcatggcagacatcggttacaattgccacattaggtttaatggtctgagcaatcatttcggctccgcgaagaccaatctcttcctgaacagaatttacgatgtacaaaccaaacggtagtgttttattattttcttttagtaaacgagctacttcggcaatcataaagccacccattctgttgtcgatcgcacggcatacaaatttattttcgttcaaaatcataaattcatccggatacgtaatcacacatcctacatgtactcccatagcttcaacctgctctttggtttcacagcctaaatcgataaagatattactgatttttggagtttcttccttgtcacgcagacgggtatgaatggcaggccatccaaatacaccttttacaattccttttttagtgtgaatgtgcactctttttgatggtgcaatcagatgatcggaaccaccatttctgattacgtataataaaccgtcatcagtaatataattaacataccaggaaatttcatcggcatgaccttcaatgactaccctaaatggagcgtcagggttaataactcctacagctgttccgtaagtatctgtaataaaagtgtctacatagggttttagataattcatccaaagtttttgcccttcgctttcgtagcctgtaggggaggcgttattgagatagctttccaggaaagcaattgaggtatcctttaagattgattttgtgctcataaaaatatttttttgctaatttataaatttggtatcagagttgtatataaatatataattttacatttaaattatgactcgatgagatttactgcccctattttattttttatattgatttcgttaacaactcaggctcaggtgaaacctaaagagaatgagcaaatgggttacatattaacggaacaggattctattttgaatgacacgattgaattgcccgaaattattatttcaaaggaaaaactggatcctgaagcgcaaaagcaatttacgattcttcaaaaccgtgtttataaagtatacccgtatgcaagacttgcagcagaccgattaacggcattgaatagcggaatggcgcgcttgaaaaccaaccgcgaaaagaaaaagtactttaaaattgtagaagattatctcaataacgaatttgaagcaagacttaaaaaactttcccgcaaacaaggacagattctagtgaaactcgttcacaggcaaacgggaataacgacttatgagttaatcaaaaccttaaaaagtggttttaaagcttttgtgtccaatacaacggcaagtctatttgacattagtctgaaaatggaatacaagccatttgaatccaacgaggattatttaattgaaactattctggtcagggcatttgattccggtaaacttgtgaatcaaaaagcagcaaatcctgtaaattatgatgatttgatgaaccattgggaaacaaaagcaaaagagacaaaagcggaaaaataacagtattttatttaaagcggaattgataaagacctacagatgattctgtaggtttttttttattgttttaagttttggattacaaggttaacttagatttaagagaatatacttacttaatttttaatactgcgatttatctctgatagcccgtaaattcagtgttttttgttatattttttgcagttaaacaatgtttactttgtttttttaacaaattaactgggaatataatttgttaattatagtttaatttgtaggtttacgatcttaacaaccactaagttaaccaaaaaccaatttatttatgagattaaaactacttacactattggtgttattagtggccattcccatttggtcgcagaagacatcagaaagtgattttgtaatttctttaaatggaaacaaaatcacaactacgtcaaattttaaacagcagtttaaagacaaaaaaagtacagctaagcagagcctgaaaacagagtatactttgctgcagtttacaaaaattccttctgtggaagaacagcaaaagttgaaaacacaaggaataactttacttagttatttatcgaataacgcttattatgcagaaattgctcctgagttttataataaaagcagtgtttctgataacataagagcagtgattgcagtcgatccgaaatacaaattggatcctatgattgtggataacgctatcccggattatgctgcaacaggtggtaacggaattaaagttgttgtgagttattttaaaggcgtcgaccgtaagcgtgttgaacaggatttagcaggcctgtttttaaaaaacagcaataacgatacaacgtttaatgaaatttatatccaagcctctaaagaaaaattagaagaggtcgcaaaattcaattgggtacaaaacattgagttggttgctccaccggtagaaagcgataataagccgggtgtaactttgcataaagcaaatgttttgggatctacaattcctggccttggttacggattaaccggaaaaggagtgaaagttggtgtttgggatggtaatttggagcctcataaagatcataccggcagagttatcattagagaatacgaatatagttcgtcgcatggagatcacgttgcaggtactattggcggtgccggtttattagatccaatagcaagaggaatggctccggaggtgcaaatgtacggttggaattttaatactcagtctaacggtttaagcgttcagcaagaaagagtgaaagctgcgaatgaagatggtattgaattaacatcaaattcgtatggagtaaatttaacttcaggttataataccagaagatatgataccggagatcgtggtgatgataatgttaccgtaacatttccttatcttttgaatatttattcgaatggaaatgcacaaacagcataccctggcggatttaatacatcaacaaaaaactcaaaaaatgcactacacgttgcaaacgttcaggcagatggagtaatcagcggctctagtagttttggtcctaccattgacggacgtttagtgccacaaatctctgcagtaggaaataatgtttattcgctggactacagtaattcttatcagattatgagtggtacttcgatggctactcctggagttacaggtacaatagctttgctttgtgagagatataagaatatttatgctgccaaaccgttggcctctttgatgaaagctttggtgtgtaatacttctaaagatgtcggaaatccaggtccggattataagtatggttttggacatattaatggacttagagccattagaggtttagataacaaattgttctactcaaatacagtatctaatggccaaagctacgagaaagaaatcgtcgtaccggcaggattggtgactttgaaagtgatgcttgcctacacagatttaggcggaacaccaggagcttcgtcggtttcggtaaacgatttggatgtaaaaattgtaaaagatggtgtaaccactttgccttgggttttaaatgctacgacaccaaatactaatgcagttcgtggtgtggacaatttgaataatattgaacaaatcactttggacaatcctgatgcaggaacttataaaattatcgttagcggctcgagagtgcctattggtacacaagagttttctgtggtgtatgattttgtagctcctgaattagttttaacttatcctatcggaggagagaaatttaacacagataccacagagtatattcgttgggattatgaaggagaagcaaaaccttttacaatcgaatattctgttgatggagggattaactatcaggttatagcgaaagatgttccttctgctgcgagaaattttgcatggaaagttcctgcaggaattgttgctaatgcaaaaataagagtaattgctggttcaaaagtggatacttcaagagaagtgtttaatattatttcagagcctaaaaatttagttatagcgccttcagcatgcggtgtttcatcgtataagatggattgggatccaattccgggagcaaaatacgaagtattaaaaatgaacgggtacaagtttgacgttgttgcaacggtaactgatcctacttatacttttacagtatcagttggggatgataactggttttcagttagaaccgttgatatcgcaacgggaattgtttctgaaagagtaagagcagtaaacgtagagccggtttctcaagcggttgttagtgctgctacgcttccttttaccgagaactttaattccagaaaagcaggtaattatgtgttttctaaaggaacaactggtttagtaaagtatgaatatattaatgcagattttgtggacggagcaaaaatggccggatcaggagatgtgtctgcttctccttgggtagccagtacatcagcaaatgcgtttgctaataatccgaacttcgttaagaaagtttcattctgtgatatcgatgctacaagtttgactggtaaaacaattggacttaaatttaatttaatttgggctacagttggtgcttcaccactgccaaacaaaaacttctttagacttgttgtaaacggtactccagtgaatagttacgaaagtattggtgtttatggcggaacagctacgtctggtaatacagaattattatacgatttatcggcttatgcgggaactgtctttagcgtagcttttgaatcggttatggataatgatgtacaagtgataagcaatgataatgtttacaattctgtttttattgataatgtttccatttttgaggcaactgcgacggatgttgaattaacttcattaactccaaatgcaggaattacagccagtgaaactgtaaaagtaaaagtattcaatcactctcctgttgcggtaagcaatgtacctgtttcttataaaattgatagtggagcagaagtgattgaaactattccggggccaattaatccttttactgaagcatcttatgattttgcacaaaaagctgatttttcaactccaaaactttacaaagtagttggaaaagtaaattatacaggtgatgcagttgcagacaacaatacgatagagaaaagtgtacgtaatacaggaactgatattttaatgggcggagctgctccggcacctacttgcgcagcgacatttacagatagtggttcgcgttatgcaaattacgcaaacaatctttcgcaaactataactttcaaacctgcaacagccggaaatagtattagggtaactttttctgcctttaatgtggagcaggattatgactacctatatgtgtataacggaacaactacatctgcgcctttattaggcacctttaccggaaataccttgcctccttctataacatcaacagctgcaggtggggagttgacatttagatttacctcagatagtgatgtaaatgagttaggatggatagctgatattgaatgtgttgtaaagccggtaataacagacgtatctgtagtttcgattacaactcctgaagttttaggaaaaaagaccagtacgcatgatgtaaccattagagttagtaatttaggagcaagtgctttaactaatcatccggtgttttatcaaataaacggagggacaaaagttacggaaaccgttccgacgatagcagcttattctacagtaaatttcacttttacagctaaagctgatttatcaatggttgatgctacttatactatcaaagcgggagctgatttgcccgatgcaaatgcagctaacgatgcagtcgaaaaagtagtgtacaataaaaacgagttaccggttcataccaatacaaatggatacgcaatttcgcgcttcaaatggaatgatgtggtaaataattcaggaactacggcatattctgattttaaaaacataaaaattccggtttatcctggctttacttatcagccagaggtaagcattacaaagacagaaacgccaataaccagagacttgtcaacaactgcaacaggagttttcacaatgattgtgatcgatttgaacggagatggtaatttgacagatgaattttatgcaggaaatttttgggtaaatactaccccaacttctgcagcacctgctataccatcgaccacaagtacacattatttcagaaatatggctacattggcaggagggtttaccattccgtccaacacaacagctggtgagaaattgatgagagtagtacatatgtttcgttctccaaatgaatattttaatgtaaatctagggccaacttttgatgggttaacaagttcaagaaacgattttgaagtagaggagtatactattaatgtattaccttttacagctgctgatgccagtattgatgcaattacagcaccaattaaaccaggtaatgctcctgtgacggtttcggctgtaattcgtaattattcaactgcagcaatttcgaacttcccggttgcttataaaatcaacaatggcgctgaagtaattcagaatcaagttgcttcaattgcagcaggaggaacagctaccattacatttactactaaggcaaatttaggagcgcctgataattatacaattcaggtttatacgaaactgcctgcagatacagatccttcaaatgatgctaaatcaataacactttcacatgctgcaaatcatcctgtaaatgtgactggaacttttgacggtgtaaacgactttataataacggggactacacctgctttgaatcttactaataattatacgtatgagctttgggtaaatcaaaaacaacctacaacttttgcaaggcttttagataagagtacagcgttagcgtttattcacactaataatagtttgagtttatataaggaaaacagtttagtgatctctattactactgctacaggatcatatgtaattaatacaggagtaaatactattaaacagaatacatggcaccacatcgcttatacggtaagtgctgctaacgtgtataccgtttatattgatggagtttcagttccttataccagtacaggtactgccggggcatcaacttcaaatgctgcagcacctgcctatataggtaataacgcaggattggctcgtggtttaaatggtaatattgatgaagttcgtatttgggctggagttcgcaatcaggcaacaattgctgcaaattcaacaacaaaatacgttggaaacgaacctggactattggcatattacagcttttcagaagggaataaacagtttgttttcgatagtactataagcgataatacggctatagttacaaatgctgatacagatggtttgggagctggaaaattctggaatgttcctgttttattacagaaattggaatttgtaaatcaattggcaacatcttatgatgaaggaagtaagacattcactgttctgttaaacgatggagctgatgtaactactgcggttgcaaactatactttaggaatgaaaagtattgcaaaaattggaggtgtgacacaagtgaatggagtgacgccaaacgattataccaatccagttactttaacagtagaaggagttggatttaataccggaatttctgaaacatacactattaaagttgttactggtttaagcaatgaaagtaagttactttcttatgattttaaaaccgtttcaaatccaggtttgccacaggaaatttataccgatattgttgggaataatgctactaaaacagtaccattcggttacaatgtttcaaacttaattgcagattttacggtttcgccgggtgcagagctttatgttgacggagtaaaacaacttaattctaaagtaactgcttcagattaccgtaatagtttcttggtaacagttgtttctcagaacaagcaatctcaaacaaactatacggtagatattaatgcaaaaaatactaaagcaagtattttgtcttattcagtagctaatcaggttggaacaagtgttattgatcctgtagctaaaacggtaaaagttcaggtaaacaataatgctaatttaagcgctttagtgcctaatgttcaggtttctgatttcgctacattacgtatcgggacttatattcagactagtggagtgacaacgttaaactatactggaccagtatcttataatgtgttagcacaaagcagaagtattgaatattggacattgacaattgaatcggctaaacctacaattacacttttaggcaatgcagtcatttcaattgataaaggttgcgtatatacagatccaggttatacagctgtagataacacaaatgcagatattacttcgtcggttatcgtttcaggtactgttgatgtaaatactccgggtcaatatgtaataacatatacggtaaaagatgcgttgcaaaatcaagctacagtaacacgtacagtaaatgtatcaagtacaacatgtacattgggagtaccaactaatgctattgaaggttttgtattatatccaaatccggttatcgaaggtaaggttcatatacaatcagcttcaactagtcctaaaaacatcgtcatatctgatatgacaggaaagaaaatactttccgttcaaacagaaaaaacagaactgaatgttttaggcttgccaagcggtgtgtatttaataagagtagaacaggacgggaatacatctatagaaaaattaatcattagataatttcacagactagttctggataattaataagttacaaccctacaggttttaaaacctgtagggtttgttttttgttcttatatataaagagtgattctgtccggctgagcgaagtcgaagcctttatccgctactatcggggctaggggatgggttttcaaaggaaagatcggtcataaaacaaaaacttcgggttcgagtcagaacaattatccaaccacattacctgtgatttctttgactccggagaaccttatgtatgtcatttatacctcaggctccacgggacagcccaaaggagtaatgatcgagcacaaaagtttggtgaactacatcttaaatcaaaaagaagaattcgggtttgatgtgtccgatcgtatcgtacaattctccaacaacgcttttgatgcgtcgatggaacagatctttttggctttgcttagcggagccaccctgattggtgctccaaaagagcgtatcattgatccgaccgactttataaacttattaaaccaacacagtgtaacccacctgcatgccacaccgggttatttgtcacatttagagcagctttccacttgcaagaccctaaaaagaattgttgcggcaggagaagtatgcccaaaaaatctggctgaaaaaatgattaaaatagccgacttctacaacaagtacggcccaacagaagccaccattagcgctgtgatggaaagagtagaacaaagcgatctgcaaagaaacctcatttcaattggcaaacctttaaaagacagtcagatctatatcttatccgataatctggcgttacagcccattggtgtatttggagaactctgcatctccggaaacagcctgtccagaggatacctgaacaaccctgaactcaccgaagaaaaattcatcgctcatccttttattgcaggagccagactctacaagacaggcgatctgggccgatggctacccgatggcagcatcgaacttaccggtagaaaagaccagcaggtaaaagtaagaggccaccgaatagaactcggtgaaatcgaacacgcactattgtcacaagacagtatcagtcagtgtgtggtaaccgtacaagacatagagacagaacccgcaatagtagcctatgtggtgggagaaaaagaacttgacaaacaagaacttcgtgtgcaattgagtcaatctttaccggattatatgcttccggggtattatgtacaattagacgccattgcattaacttcccacggtaaagtggatctgaaagcattgcctagagtggatgtaaacgataagattcagcaggaatataccgctccggtgacaaccttagagaaacaattagttgcaatctgggaagaaatactgggcataaaaaatattggaactacagacaacttctttgaattgggcggacacagtctgaaagtaattttggtagccaacaaaatcaaccgacaattaggctatcagatcagtgtgaaagacgtctttttgaacccaaccatctcaggaattatcagcaaacttgaaactgcagcttacactgctatccctaaagccgaagaacaatccaattatgttttgacctcttctcagcaccgactatggatactgagtcagtttgaaggtgggaatcaggcctacaacattcccggttcgtttgaactcgaaggaactttaaatgtagcatacctaaaccaggcctttaaaaccgttattaaccgacatgaaattttaagaacttctttcaaacgaaatgaagaaggagaagtgcgtcaattcatcattgatccttcagacatagactttaaaattgattatgccgatttcactacagttgaaaaccagcagctggcagtagaaaaaagagcagagcagtacgctcagcatccatttgatttggcacaggcacctttagtaaacgcacagcttgtaaaattatcagaaaaccgacacctgttactctttaatatgcaccatattattagtgatggctggtctatgggaattttgagcaacgaacttatcacgatttacgatcatttagttcagaacaaaaccatcagtctgcccgaacttagcctgcaatacaaagactatgcaagctggatgcgaagtgaagaacaaatcaccaaacaaaagaaatcagaagcctattggctggagatctttggcggtaacctgccggtactggaacttccgacagacaaaatgaggccaaaaatgaagacctatgccggagattccatcacccacaacttcagcaaagaagcaagtgttaagctgaaaacattctcagagcagcacaacagcagcctctttatgaccctgatggcaggaatcaacggattactctcaagatacaccaacaccagagaccttattctaggaacaccaattgcgggaagagagcacagtgatctggaaaatcaaataggactttatctcaacaccctggccattcgaacccgttttgaagaaacagcagattttgaaaccctgctgcaaatacaaaaagaaaccctgctcgatgcctattcccatcaggaatatccgctggacaatctggtagaacaactaggtttaggacgagatacaagccgatcagcactctttgatgtgctggtagttttacaaaatcagcaggatttatttgcttcaaatgcagaacaaatagaaagtttaaccttaaaaccttataaagccaatccaagaaaagttagtcaatttgatttaagcttcatcttctcagaaaaagaagaacagttgagtttacacatcgaatacaacaccgacatttatcagccggaatttgtagcccgtttagccaatcatttagatacttttttaaccaaagccctccaaaatccggagcaaaaagtagccaaactcaactatttgagccaagccgagaccacgcaattgctgcaggattttaacgacacagcagtagagtatcctaaagatcacactatggttgatttatttgtaactcaggcaaagaaaactccggaacagtttgctctggtgaccgatagaaaaagcttcacctacaaagaactcgatgagatttctaacgaactctcacactacctgttaagcaattacaacttagccgtagaagatttagtaggtgtaaaactcggccgtagcgagtggctgcctattgccttattggctgttttgaaatcaggatgtgcttatgttccaatcgatccgaactatccggcacaaagaattgaatacatcgagcaagacagtcaatgcaaaataaccatagacgatagctttatcgcaacttttaaacaagcagaatccatatcaaaatcattgccgcagatcactttcaatgcacagcagttggcttatatcatctacacctccggatccacaggaaaaccaaaaggagttatgatcacccatcagaatgcggtagccatgttatgctggtcacaaagagaatttagcgataccgattttgatatcttatacgccgtaacctcacattgttttgacctgtccgtttacgaatttttctatccgttaagcattggaaaacaaatccgtttactgtccaatggattatcgataggagattatattcacagcgacaaaaatgtactgatcaatacggttccatcggtgatccataccctgatcgagaaaggaaccacctttgagaatgccgttggaatcaaccttgccggagaagcattcccggtgagtatcgccaaccattttaccaactcaggcattgctattagaaatctgtacggaccttcggaagacaccacctacagcagttattaccgagtagaagggacttacgaaagctctgtacctattggaaaagccttagacaacacccagttttatgtactctcagaagagctggcattacagcctgtgggggtaattggagaaatctgtatctcaggtgacggtttgtccagagggtatttgtaccaaccggaactcaccacagagaagtttatagagaaccctttcaaagaagacagcaaactctataaaacaggcgatttgggcaaatggttacctgatggcaccatcgcttacattggtcgaaaagacagtcaggtgaagatcagaggacatcgtattgaactcggagaaatcgagcaggtattgcagtcacagaaggagatcgatcagtgtgtggtcctcacggcaactgtaaatggagatccggtgattgtaagttacttggtaagcaccgcaactattgacaaacaacagcttcgtcagtcactttcgagagaattaccggaatacatgctgccgagtttttatgtgttcttagataaatttccactaacacccaacggcaagattgataaaaaagccttgccgccggtaagtacagacgatgttatccaacaggaatacatcgcaccgaccaatgaaatagaggagaaactggcagcgatatggcaggacattctaaaattggagaaaataggcattaccgataatttctttgaattaggaggaaacagtttaaaagctactgttttaatcaacagaatcaacaaggcctttgatacgagattttctattgaggatttgtacaaaacccagagtattataggagtttctaagaaattaagctttataattttccagaatcagctagcagtagaaaccgctaatgatttggatgaggtattgatctaatttgttgtgttgaataataactacaacaaagaacgaacaagaaatctgcaagatctgcggaatcaacgtgaaaaatacttaacacatagcgacatccatttttacatacaggaaagaatatctgaaagaaatacatttccttcatcccgatttatcgggacgttttatgtcaagtgaaacgccttatttgaacatagaaaaactatgtttctatgtgtttatgaattaatcccacaacagtttaatataaaatttaatcgcgagtttcattttatatcttaagcatggctgtatttaagcagccatgctttttttgcagtattttttaaaggcgtagattttttttcggctcaaaaagaaagtgtttctatttactaaaattaattatgctcagtgggtagtggcatttgactgccagctattgagagaatagtgtcatggtttgagaaaatcatacaggcatttcattactttaaaaatcatatcatgatagagaatctaatacaaacattacaatccttaaatatcaggcttcgagtagataacggagatttaaaaattaatgctcctaagggggctttgactaccgaaattattgaagaaattaaagcacataaaacggagctgatcgaactactttcgtcttcagagtctatccctaaagcggttagcaaagaatcttatgcgcttacttcgccacagcgccaattctggactttaagccagtttgaaggtgggaattccgcttataatatatttgaagcatttgaatttaaaggagttttagattttgaaaaactaactcagacttttactattttaacagagcggcatgaaagtttacgtactgtttttaaagaagatgaacaggaaaatctgggacaatatatcattcctgtttctcaatataaaggagttttacagtttacagatttgaataatgctacagctgaagtactgagtaattatgtagagagatttcaaaagcatgtttttgatttagaaaaaggaccgctttttataggagagattgtaaaggcagcggcagatcatcatattctgatgcttaacatgcaccatattattggcgatggctggtcgatggggatattgagtaaagagtttatggcagtttacaatgaattgacaatagggaatgaggctgtattagcggaactgcctattcaatataaagattattcagaatggcagaatagtcaagccagacaagccatattggaaaaatctaaggcattctggttagatagattttcgggagatttaccggttttgaaactacccgctaataaaacaagacctaaacttaaaacgtataacggttcgggatgcagccattctttttcaaaagaaagcacttctcagtttaatggctatgcacagcaaaacggagtaacactttttatgcttttaatggcaggtataaatggattactttccagatacaccaacacgagagaccttattctgggtactccggcggccgggagaaagcacagtgatttagaaaatcaggttggattgtacttaaatacgctggccattcgaaccacttttgaagaaacagtaagttttgaagaattattggccatacaaaaggaaactttattagaagcttattcccatcaggactatccttttgatagtttggcagaagcgcttaattttaaaagagacctgagtcgatctgttttatttgatgttttagtggtatttcaaaaccagcaggaattattaacctcccaaggcttagtgttaaacggtctcgaaatagcgccttataaaaatttaaagaagtcatttagtaagtttgatttaaccttttctttttcggagaaacaagggcagctacatttaaatatcgactacaatacggatatttatgaattggattttgtaaagcggttggcttctcatttcgatagttttttaacaaaggcaatccaaaatccgggtcaggatacggccagtctggactacatttcaagctcagagaaaacgatccttttggaagattttagtacttcaaaaacagcagcaacagtagaagctacagccgttgaaatgttcgagcagcaagccgggcagacccctgatgccgttgcagtagttttcgaaaacagatcgttgacttacagagaactcgacgcgctttccaatcagctggcacattatttattgactcactatgacataaaaacagaggacctgatcgctgtaaaattagagcgcagcgagtggatttacacctcacttttggccgtattgaaaaccggcggtgtttatgttcctatagatccgggttatccggagcagagaattgcttatatcgagcaagacagtacatgtaaagttgttattgacgagaagttattggcgaatttcatatcgagtcagaacaattatccaaccacattacctgtgatttctttgactccggagaaccttatgtatgtcatttatacttcaggctccacaggacagcccaaaggagtaatgatcaatcacaaaagcttagtaaactacatcctaaatcaaaaagaagaattcgggtttggtgcgtccgatcgtatcgtacaattctccaacaacgcctttgatgcgtcgatggaacagatctttttggctttgcttagcggagccaccctgattggtgctccaaaagagcgtattattgatccgaccgacttcataaacttattaaaccaacagagtgtaacccacctgcatgccaccccgggttatttgtcacatttagagcagctttccacctgcaagaccctgaaaagaattgttgcggcaggagaagtatgccccaaaaatctggctgaaaaaatggtcaaaatagccgacttctacaacaagtacggcccaacagaagccaccattagcgctgtgatgggaagagtagaacaaagcgatctgcaaagaaacctcatttcaattggcaaacctttaaaagacagtcagatctatatcttatccgataacctggcgttacagcccattggtgtatttggagaactctgcatctccggaaacagcctgtccagaggatacctgaacaaccctgaactcaccgaagaaaaattcatcactcatcccttcattgcaggagccagactctacaagacaggcgatctgggccgatggctaccggatggcagcatcgaacttaccggtagaaaagaccagcaggtaaaagtaagaggccaccgaatagaactcggtgaaatcgaacacgcactattgtcacaagacagtatcagtcagtgtgtggtaaccgtacaagacatagagacagagcccgcaatagtagcctatgtggtgggagaaaaagaacttgacaaacaagaacttcgtgtgcaattgagtcaatacttaccggattatatgcttccggggtattatgtacaattagacgccatagcattaacctcccacggtaaagtggatctgaaagcattgcctagagtggatgtaaacgataagattcagcaggaatataccgctccggtgacaaccctagagaaacaattagttgcaatctgggaagaaatactgggcataaaaaccattggaactacagacaacttctttgaattgggcggacacagtctgaaagtaattttggtagccaacaaaatcaaccgacaattaggctatcagatcagtgtgaaagacgtctttttgaacccaacgatctcaggaattatcagtaaacttgaggaaggaaccttcaccgccatacccaaagcagagcaacaggaaagctacgttttaagctcttctcagcaccgcttatggatattaagccagtttgaaggagggaatcaggcctacaacattcccggttcatttgaactcgaaggaaatttaaacacagcacaattaacagaagctttcaaccttcttatggccagacatgaaaccctaagaacctatttcaaaagagacgatcagggagaagtgcgtcaatttatagtcgatgccaaagacattaattttaaagtagattttgaagattttactaaagttgaaaaacaagaagaagccctggaacaaagcgttgctcaaagctatcagtatcaatttgatttagagaaagcccctttggtaaacctgaaactcatcagacaatcagaaaacaaacacctgttacttttcaatatgcaccatattattagtgatggctggtcgatgggaattttgagcaacgaacttatcacgatttacgatcatttagttcagaacaaaaccatcagtctgcccgaacttagcctgcaatacaaagactatgcaagctggatcagaagcgaggaacaaatcaccaaacaaaagaaatcagaagcttattggctggatatctttagcggtaacctgccggtactggaacttccgacagacaaaatgaggccaaaaatgaagacctatgccggagattccatcacccacaatttcagcaaagaagcaagtgttaagctgaaaatattctcagagcagcacaacagcagcctctttatgaccctgatggcaggaatcaacggattactctcaagatacaccaacaccagagaccttattctaggaacaccaattgcgggaagagagcacagtgatctggaaaatcaaataggactttatctcaacaccctggccattcgaacccgttttgaagaaacagcagattttgaatccctgctgcaaatacaaaaagaaaccctgctcgatgcctattcccatcaggaatatccgctggacaatctggtagaacaactaggtttaggacgtgatacaagccgctcagcactctttgatgtgctggtagttttacaaaatcagcaggatttatttgcttcaaatgcagaacaaatagaaagtttaaccttaaaaccttataaagccaatccaagaaaagtcagtcaatttgatttaagcttcatcttctcagaaaaagaagaacagttgagtttacacatcgaatacaacaccgacatttatcagccggaatttgtagcccgtttagccaatcatttagatacttttttaaccaaagccctccaaaatccggagcaaaaaatagccacactcaactatttgagcgaagccgagatcacacaattgctgcaggattttaacgacacagcagtagagtatcctaaggatcacactatggttgatttatttgtcagtcaggcaaagaaaaccccggaacagattgctttattaaccgataccaaaagttttacctacaaagaactcgacgagatttctaacgaactctcacactacctgttaagcaattacaacttagccgtagaagatttagtaggtgtaaaactcggccgtagcgagtggctgcctattgccttattggctgttttaaaatcaggatgtgcttatgttccaatcgatccgaactatccggcacaaagaattgaatacatcgagcaagacagtcaatgtaaaataaccatagacgatagctttatcgcaagttttaaacaagcagaatccatatcaaaatcattgccgcagatcacttttagtgcacagcagttggcctatatcatctacacctcaggatccacaggaaaaccaaaaggagttatgatcacccatcagaatgcggtagccatgttatgctggtcgcaaagagaatttagcgataccgattttgatattttatacgccgtaacttcacattgttttgatctgtctgtttacgaatttttctatccgttaagcattggaaaacaaatccgtttactggccaatggattatcgataggagattatattcacagcgacaaaaatgtactgatcaatacggttccatcggtgatccatactctgatcgaaaaaggaaccacctttgagaatgccgttggaatcaaccttgccggagaagcctttccggtaagcattgccaatcattttgcagcctcaggcatagccgtgagaaatttgtacggaccttcggaagatactacttacagcagttattaccgagtagaagggacttacgaaagctcggtacctattggaaaagccttagacaacacccagttttacgtactctcagaagagctggcattacagcctgtgggggtaattggagaaatctgtatctcaggcgacggtttgtccagagggtatttgtaccaaccggaacttactgcagaaaaatttatcaaaaacccattcaaagaagacagcaaactctataaaacaggcgatttaggtaaatggttacctgacggtaccatcgcttacattggccgaaaagacagtcaggtgaagatcagaggacatcgtattgaactcggagaaatcgagcaggtattgcagtcacaggaggagatcgatcagtgtgtggtcctcacggcaactgtaaatggagatccggtgattgtaagttatctggtaagcaccgcaactattgacaaacaacagcttcgtcagtcactttcgagagaattaccggaatatatgcagccgagtttttatgtgttcttggataaatttccactaacacccaacggtaagatcgataaaaaagccttgcctccggtaagtacagaggatgttatccaacaggaatacattgctccaaccaatgaaatagaggagaaactggtagcgatatggcaggacattctaaaactggagaaaataggcattaccgataatttctttgaattaggaggaaacagtttaaaagctactgttttaatcaacagaatcaacaaggcttttgatacgagattttctattgaggatttgtatgaaacccaggatgttattggagtttcggaaaaactaaaatttatcgtattccagaatgaattggccggagagtcggttgatgatttggatgaaattatgatataaactgatctcagttcagccgatagtattttttggtgctaactagtgagaggagaatataacaattctgaaaaacagagatgctttttaatttacttaaaaaatgatatcgtgataaaaaaattactacatacgttgcaatccttgaatatcagacttcgggttgaaaatggggatttgaaaattaatgctccgaaggggactttaactcctgaaattattgaagaaattaaagcacataaaaatgaactgatcaccttactttcgtcttcagagtcaattccaaaggcagcagtcaaagaatcttatgcgcttacttcgtctcagcaccgtttgtggaccttaagtcaatttgaaaccggtaactcggcctataatctgtttaatgcctttgagtttaagggagaattgaaacttgaaaaattagccgaggcctttcaaattttagtgaggagacatgagagcttacgtaccatttttaaagaagacgaacaggggaatctgggacagtatattgtcccggtggcgcaatacagtggaactttacagtttacagatttaaataatgctacagctgaagtcctgagcaatcacgccaatgcacttcaaagacatgcttttgatttagaaagaggacctctttttataggagagattgtaaagacagctgcagatcatcatgttctaatgcttaatatgcatcacattattggcgatggctggtcgatggggatattgagtaaagaatttataacgatttataacgaattggttataggaaatgagatcgtattatccgacttgcttattcagtacaaagactattcagaatggcaaaacagtccgtccagacaagcagtgctggaaaaatctaaagcggtatggttagagacattctcaggagatttaccggttttggaactgccttccaataaagtaagaccgaagcttaaaacgtataacggctcggggttaaagcacactttttcaaaagaaattaccggtcagtttaatgctcatgcacagcaaaatggggtaacactttttatgtttttaatggcaggtataaacggattattgtccagatataccaacaccagggacctcattttaggaacccccatagccggaagaaaacacagtgatctggaaaaccaggttggattgtatttaaatacactggccattcgaactgtttttgaagaaaaaacaagttttgaagaattactcagtatacaaaaagaaaccttactaaaagcctattctcatcaggattatccttttgatagtttggtagaagcgcttaatcttaaaagagatttaagccgttcggtcttatttgacgtcctggtggtatttcaaaatcaacgggaattattagcgtctgaaaacctaaccataaacggtgttgaaataaagccttataaaaatctgaaaaaatcatttagcaaatttgatttaacctttgctttcgcagaatatcagggagaactgagtttgtacatggaatacaataccgatatttacgaatctgaatttgtagcgcgattggcggctcatttagatacttttttaaccaaagccctccaaaatccggagcaaaaagtagccacactcaactatttgagccaagctgagaccacacaattgctagtggattttaacgacacagcagtagagtatcctaaagatcacactatggttgatttatttgtcagtcaggcaaagaaaactccggaacagtttgctctggtgaccgatagaaaaagcttcacctacaaagaactcgatgagatttctaacgaactctcacactacctgttaagcaattacaacttagccgtagaagatttagtaggtgtaaaactcggccgtagcgagtggctccctattgccttattggctgttttaaaatcaggatgtgcttacgttccaatcgatccgaactatccggcacaaagaattgagtacatcgaacaagacagtaaatgcaaaataaccatagacgatagctttatcgcaagttttaaacaagcagaatccatatcaaaatcattgccgcagatcacttttagtgcacagcagttggcctatatcatttacacctctggttccacaggaaaaccaaaaggagttatgatcacccatcagaatgcggtagccatgttatgctggtcgcaaagagaatttagcgataccgattttgataccttatacgccgtaacttcacattgttttgacttgtctgtttacgaatttttctatccgttaagcattggaaaacaaatccgtttactggccaatggattatcgataggagattatattcacagcgacaaaaatgtactgatcaatacggttccatcggtgatccatactctgatcgaaaaaggaaccacctttgagaatgccgttggaatcaaccttgccggagaagcctttccggtaagtattgccaactgttttaccaattcaggcattgctattagaaacctttacggaccttcggaagacaccacctacagtagttattaccgagtagaaggcacttacgaaagctcggtacctattggaaaagccttagacaacacccagttttatgtactctcagaagagctggcattgcaacctgtgggggtaattggagaaatctgtatctcaggcgacggtttgtccagagggtatttgtaccaaccggaactcaccacagagaagtttatcaaaaacccatttaacgatacgactaaattgtacaaaacaggcgatttaggtaaatggttacctgacggcaccatcgcttatattggtcgaaaagacagtcaggtgaagatcagaggacatcgtattgaactcggagaaatcgagcaggtattgcagtctcaggaagagatcgatcagtgtgtggtcctcacggcaactgtaaatggcgatccggtgattgtaagttatctggtaagtactgcaactattgacaaacaacagcttcgtcagtcactttcgagagaactgccggaatatatgctgccgagtttttatgtgttcttggataaatttccactaacacccaacggtaagatcgataaaaaagccttgccgccggtaagcacagacgatgttatccaacaggaatacattgctccaaccaatgaaatagaggagaagctcgttgccctctggcaggagatactaaaattaaataaaattggaacgatagataattttttcgaactgggtgggaatagtcttaatgcaaccaagctattgtcattagtacatcagacatttgacattaaggtaaatatggaagtcgtttttacaaatccgactattcagtttctggcagtagaaatagagaatttaatatggttaagagaaattaaaaccacttctgacgtaaaaaaaatggtcatttaaatcgttgatgattagaaatcaaggtttacagaatagagattgtagcaataaaaaataatataattatggagaatatcgcttatttgattaaagatttgaggtcacgaggtattggtgtgacattgtctggtgatgatttggaaatttcacaattaaaagaagaaatagatacagatacaattaatcttattagaaataataaagagagactggtaaattatctgcgttctttctcgtctcaggattcattctcagaaatacccaatgctccatctttatcaagctacccgatatctgatgcacaacgcagattatgggtgttaagccagtttgaagaaggtacggtagcctataatatgccatcccgaatagtattaaatggggattacaacattgaaatgttcaaacaagcgattcaggctgctatcgaccgtcatgaaatattgcgtacggtatttaaagaaaatagtgccggagttgtgcatcaacatatacttacaccagaagcattgaattttaaagtcgattataaggattttagaatattgggtaatgagtcagcagcagctatagatttatacatagaagaagacaagcaattgaagtttgaccttgaaaatggtccgctaatcagagcttcattgttacagatgactgatgatagctatactttttactataatatgcaccatattatcagtgatggctggtctatgaaggtactttcgaatgatgtattggccttttataatcattatgtaaacaaaactccgttagaattatctgaattaagaatacagtataaagattactcggcctggcagctttcacaattagaaacagcatcttataaagcaagcaaagaatactggaacgatcttctgtccggcagcatttcaacaattgatttaccaagcacaaaaaaacgtcctttgtttaaaacaaacaggggacaaaaaataagcacttttgtttctaaagataccacttcaaaacttaagttgtattgtaatcaacaagggggaacgccatttatgggcttactatccgctttaaatgttttaatctacaggtataccaataccaataatattgttatcggatctcctattgcaggcagagagcatgtagaactgaaaaatcaaataggattctataccaatactttggcattacgcaatgaattaaacccttcagatagttttaattcggtttttaatttggtaaaacagaataccttaaatgcatatacccatcaatcgtatccgtttgacagactcgttgaagacctgcaggtaaagcacaatacttcccgcaactcgttttttgatattatgatggtatttcagaattttgatcatgataccgctgactttgattggaaggaggaaaaagagaaagaaattgtagatttaggagtatccagtccaaaatttgatatagacatcacttttgaaatcgttggcggtcaccttaaaatagatcttgagtacaatacagatgtttatgaatatgaagtcatagcgaaatttgtaaatcattttaaacaattgcttaagaatatttttgaccaaccggaaaaggaaatctcaaaaattgaacttctttccgaaaaggaaaagcaggaacaattatatgaatctaatgatacaaaagcagtttatcctaaaggagaaaatatcatcagtttatttgaagctcaggttaaaaaaacaccaaacaaaaccgcggttatctataaagacatcaaactgacatattccgatttagaggagaaatcagatgcttatgcggtatacctgacttccatgtttaatgtaaaatacggtgacagaattgtagttacattacctcatgatgaacatcttttagccgttttattagccgttaagaaaacaggagccatctatgttccgattgatcttgaaacgccgcaaagccgaattgattttataaaagaagacagtgagagtactattgttattgatgagaatctcttgttggaaatgaatgctttcgagaataaaggaagaaaatttgtaaaacctcagcctacctatgataatgaaattgaatttcttatttacacctcaggttctactggaatacctaaagggatattgataaaatctgaaagtgtatgcaacagactgtactggatgtggaataattatccgtttcaggaaacagaaatttgctgcgccaaaacctcaataagttttgtagaccatatttgggaactatacggacctctgttaaaaggaattccttctgcgtttttcaaaaaatcagagattttggatatccgcggttttattaaaagtttacaagaaaataaagtaacccgtattgtactggtgccatccctgttaagagctttactggctcatcctgccctgtgcaaagaagagttaaagttgcttaatgtatggataagcagtggagcttcgttaaagaaaagtgacgtgcaacatttttatgccgtacatcaacgaggagacgttaggttattaaacatatacggatctacagaagtgacagcagatgcgacctattatgatacttatgaagactataatcattataaagattttaaacttttcgaatacacttcagatgacaaaatagaagccttaatctcacagcacgacgtagcgtcaaaaatagtatcagaagactatcaatctcttttggatttgaaaaattttaaagatgttggtcttgattctcaatacaatcccgatgcctacctgaaatttgtagaaacagaagtaattcctaatgtggttaatgtgagcaaaccttctttcataggtcacatgacaagtcctattcctaaaattattagagaaatgaatgctctaatagtggcgctgaatcaaaatcaggttaaaatagaaacctcgatggtagctactttgattgaaaaacaggtaataggaatatttcacaacctggtatatgcaaatgatctgaaattttatgacgattttgttcagaatgcagatcaggcccttggtgtaattaccaatggtggtaccatgtctaacctgatggccataaattattcgttaaataacttattaggacctaaagaaggatttagcgggattaaaaaagaaggacttttagcagcactcagggcctatgattatgatcgtgtcgttttactggggtcagattggtgtcattattcatttggaaaagctttaaaacttttaggtctgggtaccgatgcttttatctccatagactatgaaggaaaagaagcagctgctttagaaacagagatcgtttcactgattgcaaaattacgtgaagaaaagtgtcttattttaggtttagtaggtattgcgggaacaacggagtccggaaatatcgatccgcttgaaattttaggaaaaatagcaaaccatcataacattcattatcatgtggatgctgcttttggaggcagttttttaacggacgatacgcttaaactgaaaatgaaaggtatagaattagccgattcagtttcgatttgtgctcataaacagctatacattccgatcggattgagtgtttgtgtttttaaagatccgaattttgtaaattcttccgagaacaatacccattatcaggcgagaaaaggaagttatgatctgggtaaatatactatagaaggctccaagaactttatgagttttgctttacacgccgtatttaagatttttgggaaagaaggctttgcgcaggtaatcagacacaattatgctacagcacagttttttgcacaagcgattgataaacacccggattttgaccttgtttttaagcccgatctgaatattgtactgtacagatatttacctaaaaaatacagaggcaaagaaagtctgagtaacgaagatttagaacaaatcaatgagatcaatcttaagattcagaaggaacaatttaaacaaggaaattcttttgtttcctatacgcagataaagaaaagggaaaatgagcaaagacatcttctgttccgaacagttttcatgaatccatataccacaaaagaagatttgttatccttattagaagagcaggttaccattgctgccactatcgaaaacagactttacgaatcgcattccagtgttcaaaacgaaagcatttttattggtaaaccgatagaaaatgtcaaggtgtacatccttgatgaatttttaaacgtattaccggccggagtggtaggggagatctgtatcagtggagaatgtgtgtctgcaggatatacaaatactgtagaagattttgcggcgaagtttatcgagaatccatttttaaaaggagaacgtttgtttagaacaggcgatttaggaagaaaatgggaagacggtaatattgagtttgtaggaagaaaagaccatcagattaaaattagaggaaatcgcgttgaattaggcgagatcgaaaataccttgtgcaaaagaaaggaaataagtcaggctgtaattacggttatcgagaatggtgtgtctcaggaaaatgaacttgccgcttacattatttccagccagaaagaagaagtaatggatctgcgggcatccttaaaaaagagccttccggaatatatgattccttcttattttgtacagttagaaaaatttccggtactcaccaatggaaagattgatctcaaagcattaccggatcctctgacagaaggcatttcgaccaaagtagcttacgtggcaccacgcaatgctattgaaaaagaactagtcagtatttggcaggaagttttggataaagaaaaggtaggggtattagatgatttctttgaattaggaggtcacagtataaaaggaactaaacttctgtcccaaataaacagagcttttaatgtcgagataaacattaaaaatttatttatgtcccctacaatagaatgtttggcggcacaaataaaatttatagaaacccaggagcaaataaagtctgaaaaagaatcacttacagaaatagaattatgatcgatttattacataaaataacagagggcggaatcgctttagatatagtagatggtcaattaaaactttatgcaaaagccaaagaagtagacccgcaattactagcagaaataaaagaaaataaagaacaaattctggcgtatttattagataccggagcattagataaaaacacagctgtcctacagcctatcgttcctgttgctcaggcagaaaattatgcgctttcatttggacagcagagattgtggacattaagccaatttgaatccggggcaagcacttataacatgccctatcatattgagcttaaaggacagtacgatcttatttatcttaagcaagcaatacgtgctgtcatagaccgccatgaaatattgcgtaccgtatttaaaacaaatgaaataggagaagtacgtcaatacataattccaagtgaagattttgagtttaatgtcacttatattgactatcgaaatgcttctgataaagaacaggaagtacaagattatataaccaatgatgcttctaaatcttttgatttggaaacaggtcctttgtttcgcgttggtttgctgcaaacagacgataatcgatatactttttactataacctgcaccacattattagtgacggatggtcgatgaacatcttatcacaggatgtacttcattattacaaagcctatgcaaataatgcagctgtagcactggaaccgttaaaaattcagtacaaagactttgcaaattggcaattggaacatttaaatagtgagtcgagtactctttcaaaagaatattgggccaaagagctgtcaggtgatttaccggtgctggacctaccgtctgaaattgttcgcccgactgtcttatcttatgaaggtcgtggatacagaacttatttttctaaagaactttcgaaacgtatcaaagatttttctacagaaaatggaggaagtttatttacgggacttttagcagcctggaatgtgctgtttcataaatattcaggagaacaggacatacttattggaagtcctaatgcaggccgggaccatgcagatgtgttcaatcagattgggttttatgtaaacacaatggttttacgaaatacaatagatcctgagatgactttcagatctctttataagcaggtaaaagaccgaactcttgaatcttataaacatcaaacctatccgttcgatcgtatcattgaagatttgaacattcaaagaaacgttggcagaaatgccatttttgatgttttactggtactgcaaaatgccggaattcaaatttcagatgctgatctggaaaatatagaggttagcgagatcagagagttaggtgttaaggccgctaagtttgatgtagaactaagttttgtcgaggcaggaagttatcttgcttttgatcttacgtacaacacggcggtgtatgatgaagggagtatgaaaagaatgatcagccattaccagcaattatgggaggagttattagacaatctggatacaccggtaacggatatctcttatatttctgaaaaagaagaacagcagctgcttattgattttaataaaacaacagcaccttatcccgatacgttatccatcccggaagtattcgaaaaacgagttcaggaatctcccgatgcagtagcagttgtatatgaagatcagagttttacgtatttagaattggatgatttatccaataaatttgcccagtttatacaagatcaatatacaattgcttctaatgacactatagggattaagctggagcgaaatcattggtttgtggtagcgttattgggcgtactaaaagcaggtgctgtgtatgtaccaatggatcccgagtttccaaaagatgtattggactttattacaaatgatgctgcctgtattttctgtataacaaaagaagaattacaagccttcataacctgtaaaaaggatattgatatttcagattttaagctaaatcaaacagcagatccgttagcctatattatgtatacctcgggatctaccggaaaaccaaaaggagtaatcataaatcaaaagtcaattttgcgattagtgatgaacaccaactatttggatgttacttcacatactgttttaggactctcaaatttttcatttgacggctctacttttgatatttttatgcctttattaaatggagctaagcttgtcatttcggagaaaaatatatttcttgatctccaaaaattcaatgagttaataatcaccaaaaacattagctgcttttttataacaacagccctttttaatgtcattgttgaagccgaattacctgcgttagggcaaataaaatgtatcttattcggaggggaacaagtctctgtaaaacatgtcaaaagattcaaagacctatatcctgcagtaagtttacgtcatgtttatggcccaacagaaaatacaacattttctacattttatgaaatcaatgccatcagtgacaatcctaaaacgatacctattggctgttcaattacaaacagtaccagttatatattagatgctaaaaataaattagttcctatcggagttccgggtgagatatgtcttggaggtgaaggcatcgccgaaggttatctcaatagaccggatttaacagaaactaaatttgtaccccatccctttattgatggattaagtatttacaaaaccggagatacagggaaatggctgtcgtctggagatatcgaatttattggacgtaaagatgatcagataaaaataagaggtcatcgtatcgagttaggagaaatagaaaatgcactattaaccatagatgcgatagacgatgccattgtaattgcaagaaaaaacaaaaacgacgaaaaagagatcgttgcctatatggtatccggagtaacgttgagcgcttctgatttacgaaacgaactaaagaaaaagttagccatttatatgctgccttcttattttgtacaattggatcagtttatattaaacagcaatggaaaggtaaataaaaaattacttccggatcctgaaacagtctgcctttctactacctcagattatgtggcgccaagaaacggtaaagaagaacttttagttagtatttggactgctgtcttgcaaaaaactacggtaagcgttaccgataacttttttgaattaggcgggcatagtcttaaagcagccagattaattgaagagtatcgcagagcttttaatgttaagcttactttagagacaatctttttgcatcccatattagaagatcatgtacagcttattgaagagagtacctattcagaatatcagtcgataccggttatggacagtaacgatagttatgcactttcggcaggccaaaaaagattatgggctttaagccaactggaaacaggagcatcgatgtacaatatgtcatttcataccatactggaagggagttatgatatagccgttcttaaacaggccatttatgcaacaataaaacgtcatgagatactacgtaccgtttttaaaattgatgatagtttaggagagcttcgtcagtatattattcctaatgattcattttatctcgatattcctttcctgaatcttcagggtgaagacggcatagaagataaacttgctgcttatcgcaaagaagacctccatcttccatttgatttgacaaacggaccattagtaagagcctgtttgtttcagttagaagaagcaaaatatgcttttcattatagtatgcatcatattataggtgacggctggtctatggaagttttatccaaagacatattcacattttatgaaagctttaaaaataatacaaccgtttcactgcagccgcttaaaatacaatataaagagtatgcaaattggcagcgattgcaattagaagaggcttccagtcagcaggacaaagtattttggaaagaattgctgaacggttcattaccagtacttgatttgccaacgcaaaaattgagaccagctgttaaaacagctcaggggagacgattcagaacctatctttcagcagagcagacaacagcaattaaaggagtaactcaggaatatggaggaagtttgtttatagcccttttttcaggctggaacatcttgttgcataagtatacggctgcacgtgacataattattggaactccggtagcgggaagaaatcatattgatcttctggatcagatagggttttacgtcaatacaattgcattaagaaacgaagttaatccggaattgtcttttgtctctttttataaaaaaataaaagaacaaaccctaaagtcttataaccatcaaatgtatccgtttgatcagttaatagacgatctggatattcgacaccaaacctcccgaaatgctgtttttgatatcatgttttctttacagaatgtactatctcacagggtggatgcaatcgtatcaaaagatgctgtaactgcaattgaagatacaggagaagcgattgcgaaatttgatttagaagtaaactttcaggaagtgggacaatgtttgttatttgatgtaacctacaacacaaatgtttatgaagcagaaacgatcgaaggtcttatgaaccactataagcaattatggaatgtaattcttgagcagccaaatgaattaattcagaatcttacttatttatcacaagaagaagaagatcagctggttcacacatttaataataatgacattatatatcctgaagaggatacgattgtaacactatttcaacaacaggcagaaaaaacgccacataatttagcagtagtttttggagaaacacaaattacgtatgcacagctggatgcactttctgataagatggcaaactatatcagaaatacaaatgatgttcatcctgaagatcttatagccgtgaagttagaaagaagtgattggtatgtgatcgcgctgctggcgatacttaaaacgggtgctgcctatgtacctattgatctgaattatccggaagatcgtattgcatttattcaaagcgacagcaactgtattgctacaatagatgattcttttatctccgaatttcaaaatgcaactattgtatcagatagcagggatgtaatggtacaggcttctaatatggcctatgtaatatatacttcgggatctaccggaaaacctaaaggtgtcatggtcgaacacaaagccttaagtaacttgtgccactggcatcaaaaagaatacagtctaagcacagacagcagatgtacattgtacgcgagtataggttttgacgcctctacatgggaattatttccaacgctcttaagtggaggatgtgtatacccaataccggaatccattcgcttaaaaacggcagacttaattgcatttttcaatgtccataaaataacgcaggcttttgttcctacagtattatacaacgatatattacgagacagtgcaacactgcagcagcctttaaaactgttattaggaggcgaggcacttatagtaaaagatgtaaacgataagctggaaatctataacaattatggtcctaccgagaatgcagtggtaagtacttgttatagagtaaaaaaggacactgtaggattggtgccgataggaaaaccaataggtaatgtgaaaacttatattctcgatgaaaatggaagtctggtacccccgggagtaacaggagagttatgcctggcaggaaagagtctggccagaggctatttgaatagcccttcactgactggggaaaaattcgtatcacatgttttggcaggtgatgggaagctctataaaacaggtgatcttgccaaatggcttccggatggaaacattcagtttatgggacgtaaagacaatcaggtgaaattgaggggatatcgtatcgaacttggagaaattgaagcggctttgcaagaaataagcgggattaaagaaacaattgttcttgtaaaagagattaaaggtgaaaaatacattacggcatatgtggtaggtaacaccgaaattgatcgcatgattcttaaaaagaagctaagcagaactttagcagactacatgataccaacctattttatttatgtagacagtatgccattaaccgctaatggaaaagtagatgtcaaattactgccggatacagacgacatacaatttaaggaagtggccgtttatgtatctcccgaaagtgatttagaaaaacagttggttaccatatggcaggacatcctagaaaaagacagaataggagtagaggacagcttttttgcacttggcggacatagtttgaaagcaatacaagtgatttctaaaattcagaaagaattcaatatcaaaattgaacttaaagaattgtacaacgagccaagaattaaaaacctggcaagttacatagaatcgatacaaattctgaacagccagcagccagtctttatggctgttggtgaagaattggttttttaaaactatagtttagcttaagaaagaatagcgattatcagataaaaacagttacaggagtattcttgtagctgtttttttattttaagggtatcgcaacgtacttttttttaagttttttgggttgttagatatgtagtgatctgatttacagcaggtagttttttaagtatcatttaatgagtgattttgggaccttagcagataaaaactaccttttaggttaaaagggtacccgttgtttctgtttaattttgaataaaaaattaatattatggatgatcgttattcaaagaataaactttatctaagcgatgaagaacaagagattataaaagattttccaattttgctggctggaagtggtattggaagcgtaatcgcggaatgtgcgttgcgttttggttttgaaaaaatcactattgtagacggtgaccaggtagaacggtctaatttgagcagacagaactatacagaagatgatatcaatttgaacaaggtagacgctttggcaagacgattgaaatcgattaataaaaatgcagaaattaattgtatcgattttttcctgactgtcgaaaacataggagatcatattaaaggtcacaaagcggcaatcaatacgcttgatttttcttctcccgtaccgttaatatttgataccgcttgtcaaaagttagacattccggtgctgcatccttacaatataggatggggaagtctggtaactgttattgccagagatggtcttcttttaaatgcattggcaaatggggaggaagaatttaatgaagctaccatgatggaatacgcttcaagttatttgagattttggggaaatccacaaaaatggatggacagtataatcgaaaagtacaaaatcgaaaaaggctgtcagtcgccgccgcaaatggccattgcatcgtggtcggtagcagctttatgtactcatttgctttttaatattgcaacgggtaaaaagttcaaaaaattccctgagttttatttgtctgcaattattgatgaagatttgtaggattctaaagagtgaagagtgaagagtgaagagtgaagagtgaagagtgaagagtgaagagtgaagagtgaagagtgaagagtgtaaaaactagtaagaattggttttcttttgccctttcagggcgatagttgaggctcattttggttcatacgtagtgcttcgcatcatgctctttgcttttcgggttttcagtcctttttccttgcgtgctttgcgtaaacctttgcgctatttgcggttagaaattagctcatagatgatttatggtttaaatattctttttatcgttgactgcgttagggatgggagtgatatccttttgcgattactgtacatagaaaaaactgaaacttctatcgcaaaagatttagcggacagcccgacccgtaggggaacgccataaaaattgttgtctttaatagattgatgtttaaatgagatattagtatgattaaatgctgtttccttttacaattccgcgggatgaattttttataaaatctaatattttatcacgctcataagtttgcttcatgtgtttttcgataaagtctaatgcaagagaggtatttcttttttgctgaaagataatacgatatatttcttgtagttcttgcattttttcaatcttaaaacctcttcttcgtaaaccaatggtatttaatcctgtaaaacttaaaggttcacgtgcaacgagtatgtatggtggtacatctttgacaatacgactcatgccgctaatcatagtatgctctccaataatcgaaaattgatgaattgcggttaatccgctgatatttgcgtaatcaccgacttttacttctcctgccattcccacattaaaacctataatgcagttattaccaatgaaacaatcatgtccgatatgagtgttggacatgattaaattatgattcccaattactgttttttgttttgattgagttcctttgtttatagtaacaaattctctgataatattgttgtctccaatttccagagtgctatattcgtttttgtattttaaatcttgtggggttcctgataatactgcattgggatgtatttggcaattccggccaattctagcaccgtcaagtaggtttacattattgccaatccaagtgttatcaccaataattacattattttcaatagttgtgtaattaccaatatgaacgtttgttccaataattgcatttttgcctatagttatatttttcaatttgattgtctttatatgaaaagcaaatgttggaaaaatataatgattttttcttgatgtaaaatcaattaattgaagatcttattctgctcaatgtttcctgacttacaccgataagcgaggcaatatgttttagttttgattttgcaataataggaggaaatgaagttaataagtagaagtatttatcctgagcattcatggatttataaaaatgatgaaattcgttcaattttgacagataaattctaagcagcttaatatagaatttagaaaataaaggatattctaatagaatttgctcatctgtgtacgataatgaataaagtatggtgtcctcacatgcctgaaaaagctcaaatgagggtttctgttcaaagaaactactcaatgaagtgatgaattgatgatcggtataaatccatttagttacctcttctccgtcattataaaaaaatcttcgtactgaaccggattttataaagtaaattttggggcaaatttgcccttcatttataataattttatttttcttgtaggattcttctttaaagtggttttttattgccttttcggtctcttgatccagtgcctgaaaattgtttataaatgcaagaagctcttccattgcccttatttagttggtttatttattgaaaattagaccaaatttaggtttaattaataacgaatatagtctatttcttagaagaacgatcattataaacattgctgagtgtattatgcgaattctgttttgtttagatgcattgtttatttggatgaccagtaaaaaaaaagaaccccaaaagagtattttttggggtagattttagggtagaaatgaattaaacctgtttgtaatcactatgccaaacagcttcttcaggaccatctcctttgtgtccgtctaactgaattacgaaacttttagccgggaagtatggtgtgatgtggatatctagtaagattctgtctttttgagttttatcctgctcaattttcattacggtaaacttctcaataagattagtaggtcctttaattccgtcaaggaacttaatgatttggcttcttaaatcagcttcagttctggtagtccagttctcgaaagctcttctgtttaagaaatcgaaaagtactttggtaatatggtcgaatacacgtactacagagtaggtttgtaaacctaagttgtctccgttgaacaatgttttagcagagaaagccataattttgctgtactcattaaccattggtaccaatcccattttttcaatttctgagatttcacttttcttcaggtcaaaacgaacgctttctacctcgtttaagcctccgaattttttaccggcaactacctgagacattaatgttttgtatattttacctgctaaagaagtcgatggtggtacataaagattgtcctcttctccaacttcgttatttttacttcttcctaacaaatagttacaagtcataatagtgtttgatttgtacacatcaccaccagtatgattggcattgaagaagatatcgataacatcatccggagtttcaagatcttggaagtcagttagtaatactgttttattctcgtgagctattttggaccatttttctaaaacagcgttagaacctaaatatcctggaactgaaagtatagagtagttttttctcaaatcaagacggtcaaaattttgctttaattcattcgaaacataatcaataaacaaagtattgtctaaatcttttaattgcgttatatcggcgtttacgatcgttacgttcttgattttatcgctttcagcatttttgtagaacaaagcgacactacgataagaagtttctagttctcttgtagtgtttaaggcgtatttcaggtttttatttaatgttgcatctgctgatgttgcttttgcattggccacttcgatcatggattcaacagaattatttccttttagtaaatccagccacaaatcaagtctgttattaagagtagttctctcgctttcccattgagcatcgttaagaaagatattttttctagcttttctggtcgggtttaagtttgataatccgtcgattacgttttctaagaaagcaaaacctccatattcgtttaacaggtttattttgcttggggattcttgtactaattgttcgcttgaagaaccttgaactttttgttctttagtttgagttgccatatttactgtttgttgttgttaatttcgttcttagcgttttgaagtaattcgattaccgcttctttaacagccgggtcctggattgcttttattaaagctctgttgctcgaaagctggcgaacaattttgtacgcttgttccttttcagtgtttaatttattaagaaaaggactgttttcttttatagattttgctccaaaatctcctaagttttggaagaccatcgattcgtttaaatcggaaccttgttccgttgtaaattcaaagtctacgctaggtttgtacttctcaaaaaccgcttctacagtctgcaaatcatagacagcttcggggccaaccggctgctcatttgtaagtttttgaattagtaatgttctgttcgaaggaatttccaaaattgattcactggcgtcaacttttacttcattgccaccaataccataattgaacatgctcataattttataagatttttagttgattttgtaaaactagtaaaaaaatactttaaaataatattgatttgtaagtattttatttggagttttgtagcaatgtgttaaaattaaaatttgaacctttagttttataaaaaacaactaaatttcgacaaaagatgaaatacctgaaataccctgttaattttaaatctttggtgagaggttcacaggataatttttgtaagatagaagaatcgattgcttataacatcatgatgattattaccacttcatttggagagattcccgagatcccaaattacggatctgtcatctgggacctggagtttaatcaacatataaagaaaagagattgggaggatttggttagaaaatccctgttaaagtcgattactgaatttgagaggagattaaccttaagtgaagtcactatttcgttagatgaaattgataatacggagctgggatcaagcataagaagaaaagcaaacatagtcgtaaaaggagacattatcgaaagtctgatgccatttagctttcacacaaaattgaatataagcccaatttctcaatagtacaaaatatgaaagacgttaagtttattgaaataaaaaatagaatacaaaagaagtgtttagagatctggggaattgaaaatattaacatggccgaccccttggtcatgatgttattagacgtttttgttcatgaactttattatttgtatcacgaaggaatcgaatctgataataaaattattgaacgcattgctcaggaaattgtgccaagtcaatggaatttacctatgccggctcacgctttagcaagtacagctgcaacaaatggtattgtggtactcaacagtgatgctgaatttattataaaatcgacttttgcaaccaatgttgattatgatattcattttactccttttaccaacgaaagcattatagagggtgaggttggttttcagctctatgattccttattgatcgattcttttaaaaatgtcaatcgcttgccggtgcattgtaaaatttcggatcacaggatgtggatcggactggatgtttccaaagaaaatctggagaagttaaaatctttgaaatttacatttgttacagataattcttcgttagatgctttcttacagtttgttacggtgagagatactcacggaaatgctattgattttgaaaatgaaagttttgcggaagttcaggacaacaagcattacgttgaagcgataaaatcctactataaaaattttatttacaagttaaaactgaatccggagaagttggtttacgagtctttactagacaaattcaacattgaaaaagaagcattaaaatctgctaaaaagaatacagaacttatttggttagagtttgtatttcctgaaatctttaccaaacaggagcttgataaaattcagataaagatcaacacattcccgatcgtcaaccgaaaactgaacaacagagttcataatgctcaggtggaaggacgtctgtttccaatgaaggcagagagaaacacgcactttttggatgtgatgaaagtttttaacgaaaaaaacatcgaattcatcaatggaatcaagcagcctaatgctatcacttcaaatacctataccgttttttatggcggattagagaattacgattccagaacggcaaagtttttccttaaaaaattagccagagctttacgtgaagacatcagttctttttcgaatatcaatgccgattatattgatgcgacaatgactaaaatcaatgaagaaattaattcaattgaaactaagattaccagcagttacagtcaggtcaatgaagaggaagtttatgctctgattcatgaaaccgataaatctaaaattttgtactgttcgtattggacttcaaacggtcaggtggctaataatttaaaaaaaggtaccgttttaaaacaaacggtcttatcagaattagttcaggattctaccgtttttgagacgacttcgcttggcggaatttacagaaataacaaagtcgagaaattaatcaatcttcgatatggctttttatccaaagagcgactggtaacaaaacaagacataaaatctgcggttcattatcatttaagaaacattacaaaagaggtattgattaccgatggggttggcattagcaatgaaagaaaaaaaggagtattcagaaccattgatgtaaaagttattttgcaggataagtatgctttacagatagaaaacaagcaaaaaataggattgtttttgaaggaaaccttagagaaacaatccgtgatgaacatcccatttcaaattaccataaactaaagttatgaatgaattagattacagccccagcttactatctgccattaaatctgctaaatcgttggctattcaggatggacacagcacttacggtgttccgcatttagcctatgcactgttatatgagccaacaggattgacagaggttttaaaaacgttatcaaaagacatagattatataagagagtggtttgatgtaagaaaggaagtgtatacatcctctcagagcaatgataacattattattgccgatgcagagatcgaaaatgtttttaccgaatcaaatttcaataaaatcagattgggagcagattctattgatgctttttgtgtttttattgccattattaaacccggattaatatacagtgataaacagatcgacggtttaaatttaagcgataaagaacttttaaaacattttgggcttcgcaatactcaaaaaagttttaatctggtagataatgacgataaagaagaaactgttgatattaattattgtgatacactctacagaaaaaatataatcgaagaaggtagtgctattattggccgaaataaggaggtaagactgatacttgaaaacattgaacgatacgaaaatcacggaattttgttgattggagaatcgggtattggaaaaacaagtatcataaaaaatctgatttacagtttacacgaaacagattctaatttttttgaagaaacactggtactttctttaaacgtgtctaaacttgttgccaattgcagcggtgaaaatgagatttcgaagaaattgattgaaattttcgaaaaattatccaagaacggaaagagcatactttttattgatgacatacaggtgttgttaaattcatcaagctcaaaatcaaatgcggtaatcaatatcatcaatacacagttaactcagggaacgattaacattattgcttctattgattcagattcgtatcgaaaatcgatcgaaggaacgactattgacggaaagtttgaaaacatttttatcgaagaactcgatcatgctttattactggaatgtctggggatttataaaaataaattagaaaagcattataagatagggattgacgatgaagttatagaagaagccattcatttgtctaaaagattttataaagaaaagaaactgccttacggagccattgatttattagaccggacagcttcctcggtaattgtttcgaatgccaattccttagttgaaattgtaaaaataaaagaacagataaaagaagctgaccctgccgacgaatcacggatgagtttgctgaaaaaagaaatattcaacagaattagctgtgtggtaaccagtaaaattagtgctgccgaaaattcaaaaaaacaaaaagacgaagtaatcacttttgatgccatcgaaaaattatcagctgatatcgaagcgatagcaaaggagaaaatcactgtggttaaaaagtctgagattttggcagtcgtttccaatgcaaccggaattccattaggaaagataagtgcaggagaaaaggaaaaacttctcacgattgaagacaaattacaagagagagtaaaagggcaggcacatgctattaaaacactttcagaagccataatcgaatcccgaagtggtttgagcaatccgaaacagcctattggttcgttcttctttttgggaccaaccggtacaggaaagacagaattaacgaaaacacttgcagaactgctgtttgatgacgaaaatgcgatgattcgttttgacatgtccgagtttaaggaagaacattcggcggcgttattgtatggtgcgcctccaggttatgtggggtatgaagaaggagggatgctggtgaataaaatcagacagaaaccttattcggtggtactttttgatgagatcgaaaaagcgcacagttcggtttacgacgtgtttttacagattatggacgaaggaaaagtgcatgataagttgggtcgtgaaggtgatttttcgaatgcaattatcatttttacttcaaatattggaagccaatggattcaggagcagatagaaagcggtcatttacccacttctaatcagttgattgatattatgagtcagcatttcagacctgagtttttaggacgtttgactgaagtagttccatttgctccgatcaatatagaaatcgccaaagctatttttaaactgcatcttagccgtctgcaggaacagttaagaacgatcaaaaatatttcttttgatttatctgattcggctttagagtatctgaccaataaaggattttctaaaaaatatggtgccagacctattgcgggaaccgtacgaacttatctaaagaaaaccatttcaaaactaattatatccgaagctattttggagaacgaaagtattgttctggatataaaaggggatgaatttatctgggaaaagaaataagatatggaacaggatatcgcagttttaaaacaacagcttaattttaatttaagaggagaaattctttattatggattgcaaaatattcttaaaaaggaaactgaagtctttgtcagacataaaggcctttccaaaagacacaattcaagagacgctatagatctctcgtcgatgctgtatcaggaagattcgagatttaccaaagaagcgctggtcctgcatttggccaaaaacagcatctaccataatttgcccgaattactttttcatcccttatcggttagtaattctacgatgtcgaataaagaaattgtagaagcagtaagagaaaacaaaaaagcagaaaataatgctttagacttttttatgccttttgataatgagctttttgcagcaaattcaaattatgccatcagaagtcttcacttgtttaatgataagattgatttgtttctgaaaatagtagatgaattagtctccattgattttgacttgtctaatacacaaaaaaagaatctctttatttacctgtgtgaagccgataaactcaaagagaaccttccggaactggagaaagtactggaaactttattgggtaatgtagtcaaattaaaatacaagaaacatgttttcatcgattctccctttttggaattaagtgaaggaacattaggattcaatttgggactttgcggagcggtagaaagcgagatagacgatgtagaggtggcgctatattttgaaggaaatatagattataagatattggaacgtaagatgaacctaacgcgtaaagtattagagtattttatcattagtaacagaaaaattgatatcgtcttttttaataattatcagttaggcatcaaactaaacgagaactatttgggcataaataccattttataatttttaaaccataataatgagataacattcagatatgaatacaatactaccctttttcttaaaatacctattagctccgtttttgattttgatcataacgctgattatgagccagttttcgaatgtgaaaatcaaaacaaaagcggccataatatttactttatgtttttcgattatagcagctttaccctgtttgtttgctttctttaacaatgaatttatctggtttggcttattattttcggtgatctactacatcatacttggaatcgcattggtgtatttcatgaatacagctttatttcaaaaagtagggatacagaataatgttctggcaaaagtgtttctgtttttaataatagcaattctctcttcctggatttattatctcgttttcaattatattgccatatcgagttacgctcacatcagtatgcttaatattttatggctgtttgtacctattttttttcaggaatcaaagaacaaatacttgcaaattcctgagcctttctacgaatactggagagtgggtaaagagcgcaaagatttcgaatattgggataatatcgataagttccgcctcatgcaggtgtccatacacatcagaaaaaaagccaattctgaattcttttccaaatttgatgtaaaaattgctcaggacgtcaatctggggagctggtttgataagtttatagaagaccagaattacagattccctaatgatgctatcgaatccagtgcggaaaatgaagatacgggctggactttttatacggcaaaatacttcagttttcctttgtttataaagaacttgagtccttacagaaccatttctgaaagtaaattgaaaaacaaacagaccatttttgctaaaagagttgctttaaacaggcatgaaaacggtctggaagaataattacataccatatctttttctttaaaaccatttggagtaaaaaggaaaagagattaacaaataccataaaacaaaattcaggattatgaaatcaaacattcatttaccaatcaactggacagacggtgtaaaacttacgaaagaccattttatcaataattatttcaattacgtaacaattgtcagcgattataataaagttcagctaaacaattttaattatggctgtatccagccggcgggaaacaaatcgatagacattgagataaaaattgagggaggacagctggttgcctacctgaaaaaatgcgaagtaattgctaaaaacggtcacataatttcttttaatcaggatatttatggcaccaaacttccggaagtaagtattaatgcaaacgacttagaccgaaattcttttgagcattattatgttattgtttccgttaatccttatgatttaattcctgtaggtattcctgatcccgaaatcattccattgcatcatccgcatgcccttccggagatcaagttgcacatcatcaataaaaaagaggtaaatgataattttttatcgggttactttttaattgtcaaaaaaataatattccaaaacggaacttttatcgaagacaacaagtacatcgctcctgttgttaagactaaaaataatgaaatactgaatcagtttatagcgaaagtaaacacggaattgtatcagttgaatgatttctctattaaaattcataaaaaaaatgtgcagaattcttctaataacagactggtgtcgaacacctttagtttatgcaccaaaataatcgggtattattcagaaaactgtttttatcttaaaaatgtcgctccggaggaatctccggtttatatgtttgaccgaataattgttttagcgaatcatcttatttcgacattgactttaatggatgacaaagaaaaagaggtactgctgcaatactattatgaatggattgatgtaaaaccttcagagttattgagcgtattgtttgaagcaaaaagtgccgtatacgaccacaacgatattgcacaaacgcttgaaaaactgaatcagtttttaggaattttgaagcgcttatggcaaaaattaagtgaattggagtatatcggaatcagaaaagagaacattgtaattagtgaggaaacgaaagtggcagcaccgaaaagcaatacatggtcaatattagattaaacatagcgctatgaaaccacttaattctcctaaaatagcgactcaaaaacgcaggtttttaatccttttttttacaacgtctgcttttattttcggctgtctttttattacgctgataacggcaaataaaggcgctgccgagttagagcaaaaacacaagtactacaatgatattgcagtaaaacagggcgaaatgaacttgcttctgggtgaaatcctgatcgaaatcaatgacttaagatttaaggaccgaactttaaatgaacgtaaaaatcttcagtccctgatcaacgaaaaaagatttgcaatcaataacgagattcaaaaatcaaaaacaaatttgacgaattcttttggtttgtatgaggaacttttggttgaattacagcgcatacaaactaaaattgatgtcttaaaagaagcagcaacaagctacgaaatcaaaagtaatcagcttaaaaattgtattgaaaaacataaactggaaaataaaaaaaatagtaccaaatcatgaagaaggcaataatttttgacgaaacctattggaagaaagcaaagttcaatttattatttatcattagcgcctgtgtcatatttattggtcttaccaagtttttactgaagacaccggattttaataatacggatatgctgaacagaattaatgattatgaaaaaatgcagaagattaaggtggactatgccaataaatcgaagctaattttcaaaaccattgatacgataaaatatgacatcaatcaagtacagcgtatcgatgaagtaaaaagaaacatttcagagtacaaacagctttataaagacaacgaatttcattcgtcctataatttttgcttgatcggcggaaacttgttaaatgtttttttagagataaacctggaagaaagtacggtgaaaaagaacgatacccttgtacagacaagtcttaacgaatgtaaagcagattttaaaaatgaacattaaaaacagaacagtagttatccttttgtcttgcattgcggtaattttagtgatagtagcactgctattcccttataataaacgattaagtaatcttgatttttcgattgttgatgacaatagtaatcaccagtatgaattaaacgaggaattatcttttaaaataaatgacagtactctaatatcagataaaaaagccgtttggtatttcggaaacggtgattcgattgttagtaaaggaagtgtaaactacacttatgataaagccgggaagtatttagtgaccttaaaaattgacgacaagttcgatttttcaaagcaaattaatatcgtaaacggtagaagattgacggcaagagattctatcaccaagatattttgtccggagtttggttatgtaggtgaggaaattgtgtttaccggatattctccgagttctaataattggtattgggaatttggcgaaacgggaaccatagattcttatgaaaaacaagccatttatatttttactcagccgggaatttatacggtaaagctcgaaacagataaaacgaagtatccgataacaaaagtaattgaagtgttacaattgtacgaacctttcaaagaaccggaggctgtagattcgtcaggtattgtattgaacgatattaaaaaaagactgcagaccattgctaatttgggagcaagagataccaaaacgtacagagagcaggttaattatctgaaaaataaatacatctgcaatgatttgtctgatgtcgtggtagtagtcaacgaagaaaaatacaacgattttttaagttactgtcagggacttcattatctggaaggcaatgaaactataattgaggacgtgaaattagataatattaagtgctttaagcagatcaatattacccaaaaaactaaaaataaaacaaagtaatagatgaaaagcagcattttacttcgatatacgtctttaatttgtttattgatcaccagtacccttttttcacaggttaagaacagtacaaacgttcttaaaaaaacaggagaaacagttaatacttacgataaccaggagcaaaaagaaaataaaaaaccagaactaaaaatggttttttcagatcgaaatgagaataaaatttacgaagaaccttatagcgccaaagtaaaaaataaggccgctattttgacccccatgtatgttattgatgaagataagaattattacgaagttgtcgttgctgataagaaactgattgggaaacccaaaggaacattctctgctttaagaagtaaagacaaccatttttctaaagctaaagaagtacagtatctgggatggattaaaaaagacaatgtattggaatatggcagagccatccaaaatcaggttaacttaaaatatgtaaagtattttgtggcttgtaatacgttggataatttagtgaacagtaacaataacgtcaaaaaaagtactcttttgttaaagggagatcctaacttagaaaccgcaacaaaaaaagggattaaactaaatgacttcgtctacgtctacaacataaacaaaacggcaaattcagcctttgtgtccaattctgatgatttgatgccaaaagacaccgctaattttaaatatggatgggttcctttgcaatatctgaatcctataacagacaatgtggtagtgaaactgaatcctgctgatacgttgaagttttcgtcgggtaaaatcaactttcatgcaaatgaattgtacaggaatacctttttcgtaaatgaaaatcaatccagtattgctgccagattcgataataccactaaaattttattgcctgtaaatgtatggaaccacgacaaaaataaaatcacaaatttaaagggggatgatattaccataaagacaatcgaacagattgatctgcaaagtaagaccattaactttttttacgtttttgagaacaacggcagtaccaaacaatacctaaaaaaaacactttcggcattacaaaatctaaaattaacaacgagcagtgatttgtatgccaattataattttacgtattcgtttattgcaaaagggaagtccaaaagttattttttgctcagaacatcttctttttcgaagtggtttgatttaattgaaaaaagtatcaaaacaccggaagaaattacaaatgaaaatattttacccaataacaacataaacattacgcagttcctgagtgcgggacccaactacgaaaataatttttttatactggcaggattagacggatcaataaataccgttttgcaggataatatgagcacattggctaagaataatgccaagttattgtacatcctttttagaaatgaaaacagctctgataatcaggattttatttcgcaaagtaaggcgtatttaagtgatgccagtaatgccaataaaaaatacattcagaactactatgtagatccaaaactggttcctaaaaatgatgaatttgtttacaatggcgaaaccgataatgagtacatctacaacgctcctttaaaaagtaactttaatggtggaattgtatttcctaagttaaacggggagttaactcctgaaacaataaacaaagccattgataccgttatcagtaaaacgatcaagacgaacaatgcattgctaaaatcactgactcagtataaaaatgaatttagttttttaagaagtcagccgagtgtaaccgtaaaaaatattatcgaaaattctcctttaaaagacagtgtaagtactgatgtacctaaaaaatataaaaacgaaacctttgcgataaatgcaaaagattcgttggataatgatttagaaagtaaagtacacattttactgaccgaaaacgaaattaaacagcttattgaaaattatcgggagttagtaagcaaagaatacactaatgaaaatattgataaggtagagattctgaattttaaggacaggtgctatacatttgcctcaattatcagaaggaccgaaccattaagaaatagaaattctttagcagatctgttttattttaaaacaagagtatttgtaaacagttctgatctgcatactataagaattaaagatatcagaaagtttaagagaaaaccggccgaattcagggcgctgtttataggcttaaatgctaaagttgaagccttagagaaaatggtcagaaatagtgcttttgaggtttttgatgaggagtctcagctcaaacactattatatatcgaaaaatatgctactataaaataacgattatggaacttatcaatacaatagaaatgacgaaacctttgcatgaaataattttagagttattttattttgaaagcaaagggaaaccgtgtgagtttacaaaaaaagaaattttgtggaggcttaaaaatcctagtattacagaatatcagatagaagaagtactcaattggatggtgcatcataaaaaactaaatgagaatttaggtttgtacagcctcgatcgttttgaactaattgatttagaagaaaaatttaaaaccgaaagattgcacaaagaaaaaaaacaagagcctattttttttacgaattacagtacaataaacaatatacacaatgccgcaaaacctaaagcgcttgaaatatttattcagtacatactgcctacgtttttgctttcttatattgtgtttatttttttcttagtaaacaagttaaatgacagttttgccgtaaacaataataaaattgaagacgttagcgagctgacactaaaagaacctaaaacgggagtgattagaaaaaaaagagcactgtctgacaaagaagtaaaaagactgttttctaatcagcatcagaatattttgtatttgaacaagactatagattcattacaaaaacaggtgaacaaaattaatgaaattcataccacagcaactttagacttaaaaaaccaggtcaattctttacaaccacaggtcaattcaatagtcctgcacataaccgttgtgctgctgggatttattctgttgttttttatgaaaaatgttacggattaaaggaaattagtaaaaaacagataaaagaggtattctaaaattatgcggaatatctctttttgtgtttacgggagttagatgaagaagtaaaataaatgttgaaaaaatattttttgactattagactgttttttcaaaacggatgaattttctgtcagcccttatgaatgctggattcttacatttgagaattaaaaacagctcttttttttcttaattcttctgaaaaagattacgaattgacttgttttttaaaaatgtatttgtatattcgtacaaatattgattgcgaatcaccctcatcttcctacaagaagcaattaaaaaaagtacgttagtacaaaaagaggtattctaaaatcatgtagaatacctctttttttttgttcatactagtcacacaaaaagaaagaggattctgaaaaactttatttaacaacttaaattttttattatggcatttaaatcaattttagaattcgaaggaaacgagtaccaagtattattttcaaaagttgatatgttgagacatactgacggtaaaggagctgtttcttctgaaattaaaggaggaagattaaacttgagagtaaaatctacagacaacactacagttatcgaacaagcggtaaacagccagcacaaaccggtaagcggaaaagtgaaatttttcaaagctgactctgagcaggtaatgaaagaacttacttttgaaaacgcttttattgtgttctttagtgagcagttagacgctttggctgaaactccaatgactactgagattacattctctgcagagaaaattactttaggtaatgctacactagataacaactgggctaaaatctaatttttctcataaaacaagaagcagttgcgtactgcttcttgtttttttattttcagaatatgacatcttttagcttaaaattgaattcggcacgaagaactttaaagtaaagggctttgactatcctctgtttaagttaaaaattttaaagaattaaacttaaaactagacagatttatggtcattcctaaaataatctttggtatagacggcaaagaaatttctcattttactaaaatcgatttaaagcaaaccattaatactcaccatgagttttcaataagtattccacattctgttatagaacgacctcgggcctatacgatggaaagcgcccaggaatgtcttggaaaagtgctgcacatcaggctaagcggtaataataattttctgggaattataacaaacgttcgctaccaacaagaattgggacatgtaggcagtcaaattgttatttcaggatattctaaaactattttgttagactacggtcaaaagttgcattcctgggaaaatctcaatttgaaagatatggtgcatgatctcatacaaagtgctgcaggagaacaactgcaatatgaaatcgagcccgaatttacttctaaaatagaatatcaaacgcaatatctggaatcggattttaagtatatccagagattggcgaaacaatataacgaatggttattttatgacggagaaaaacttttttttggaaaaccacaacaagaaagttctcctataaaattaatctacaacaaagacctgtttaatttaagcatatcggtagaagcaaaaccccatcagtacagcggttatacttataatgaaaatatcgatcagctttatcaggcacaaacagatgacagcatcgtagagggattaccgaaattaggaaaagacgccttcgaagcttccaaaaagttatacagtacagcttcttacgagttcggacaatttagtaccggagatgatgtgtattttgagagtatcctgaaaaaaaaacaggaaagtatagctgcagaaggaaactacatttcggcaacaagctcaaatccaaaactaagaataggctctattattaatatcgaatctcagcaaatattagataaatcagaggttcttcaaaaaggattgaatacgaataagacacaatttgaatcgaatgaaattggcacttatattattaccgaaattactcacaaagctactgaaataggagaatacgaaaatagtttcagagcacttccggctaaaataaaaaaacttcccgagcctcaggtagccatgccaatagcgcaggaacagagagctgtggtagtagccaatgatgatcctagtggtaatggaagagttcgcgtagaattattatggcaaaagaaacagcagtcccgtacgccctggttgtatgtattaactcctaatgccggaaccagcgatgttgtaaataaaaatcgcggatgggttacgataccggaggtaggtgatcatgtaatggttagttttcgatacaatgatcctaacagaccgtatgtaatcggcagtatttttaacggaaaaacaggcgaaggcggtaagctggacaatcatattaaaagtttttttacccgctgcggaagtaccatcacttttgatgataaacagaaaagtattctcataaaagacccgtcagacaacagtgtttatttggatggggaaggtaatattactgtaaatgcacctaaaaatatgaccatcaatgttggtgataatctggatattaccgttggtaaaaatatgactgtaggggtaggcggtaacaagaaaaccaccatcgacggcaacaacagcttaaaagttggaaaaagcagtacagtcgatattacagaactctacaaacttattacaaacatgtacgagcaaaaagtatcaggtgataaaaccgtgaaaatcaatggtaatttaaataaaaccacagcgacaacaactcacaaagccataggaggagatattttgataaaaagctcgggaatctcaaaagtactgggtgccattgatgccaaagtaaataaaggataacttagataagctattttaaagatctatcccaattgaaacaaaccggcacaggcaaagaaaacgtaatcgtaatatcaaatcagaatgaagcagctattattttttatttttctattggcaggtgtatcctcttttggacaagcagaagaggtacaaaaagcagaaatagaaggcggtacattatcaaaaaagtatattgacggaaaactggaaagttttattgtagaaatgtacgcggtcaattatgggaacatcttcagttttaataaagacaaagataccattaccgttagtgacggagaaaaatcagctgctgttattaagatatattttaaagatcaaatgcaaataagcgaactattttataagaagaaaatagtagcctattttgaagctataaatttgaatagagatcagttacccaaaagtaaaagcgtctatagttttcttgtaaataataaaataaagagttcaataagcagctttgatctcaacgatcttgatgaagattttgaccagaatcttttaaaactttttaatggtttaaattatgttgcaaatactgcaaatttagattccgcttttaattcaatagcccattttttttccaaagaagatgctctttatagaatctatttaacaagctatgctgaaaaatttgcccctccaataattacctatttaaaaaccaatgaatccggaaagattgaatccggaattgtctggacagggaaagagaccggaaatgggaagtatgaaatttatagtaaggagaaaataatacaatcaggaattcaaaacctatccaattttaaaaaaacttttagggaatatttttctaaaattgaaaatttagattaaaaaataacaagcataatgaacaagaataatagtattattataaaatcactactaattgctttaattatttccctgattattacaagttccattttttcaaaaggctttataagttttggagcagcggttctggcaggaattatttttagtgtgtgttttattgtgttttttgtaatcgtgagacttattttgagggctgttaaaaaggaataatcgaaaaggttaaagaatagtgagatgggtatgtataaataatagattttatgaaaaaagcttccatattactaaagttataaaataaaaaaggtaaaaaatatagtgtacagaaacaagtcaggataaagaaaaaatatgggatgtatcttacttttgatatatttacaagtagttcattaagacattataagtatgcctaaaatctaaaaaaagcatgaagaaaatagccctttatttactattatttcttataacaaatacgttaacaatttcttgccaggagaaaaagcaaaccaataaaaaagttaatagctccgcaataaaagccccccttagtaatatggaaacaaattttaaatggcaggaaggtttaagctgtccttcaggatacccaatacaagtatatagaggctggcttgaaggcccgttagtgtcaaatggtgtaaacgaagtgcctaacagtacaacgggtatatacggttttggtacaaccacaggtataggagactggggagaaaattcctcggggatgagtcagggtgaaaaaccaattccacaaagacttaactgtacctggtactcttatgttgaagatgtgatgtatcatatcgatacagagttggactatcccaaaatggtaaaactattcaacgaaggctttcagagcagcgttcaaaaagaaggaaaagtaatgacgacttataagcacattacagtgggttttgctccgggaggtgtagtagtagtgtggctgaaaggcggacagaaagatgtagaaatagggcgttatcaaggaaaaaaaacagagataagcgctaaggaaattgcctctttggacagtcatgaacgacttttgtttgatcctgctgaccgagcgcgaactttaaaaaatccaaaaattatagctccggaagatcaggaagcacataaaaataaacctattccttacggactctgggacagttaccgtataaagtacaactggcgccctacagctgtatttgtgagagagggaaaagtgcaggatgaattgtcatttagcctgtttaatggagaacgggaaacattgttagaagaagaatttgtaaaaaatgagtatcacgaaagagcgattccgcgaaatttagggattcgttggtgggataagaacggacaggggtatagtggttcctttatttttgacgagaaagaaatttttgatgccttcaaagagttgcgtaaaaagaatcctgaggcaaatattgatttagaagttaaaataaacccgggtagtgattatttgggagccacactaaaaaacggtacagatgtaataccactgaagaaaagtaaaacaaacgtttttgagtcaagcatagtgacaagagaatacaaatacaattggcatcctgtttttttgtttcctgaaggagaaaagatgccggatgaaatttattttttgactcatactttgggacagtctcttgctgaaaaaaaagagatgcatctaccgttacaggaaaatgcagcacctttcaagataagttttgattatagtaaagagaatggagaaacaggttatttagagttaatatttaaagacgaggaagtttgcgaaacgtttagagatattgaaaaactaaagcctggagcccccatagaaatgcaagtgaaaataggtaaatcctatagttcctgtactattacccttaaaggtaatggaaaagaattaccagtgaaattcactacttatcagaattagttttgtacaaaaaagattagttttcgaatcgtatttactaaaagaatatacaaaaacagaatcattgttatgggaaaaacatttgtatacaatacaggagcagcggccgatgatataaaaaaagaagaactacgcctgacttttggaatttttatagacggcacactcaataataaaacgaataccgatatgcgtaacaaacatagccggggtaaggatgcagacggaaatattgattattcaaaagacaatgcgacgctggaaagtgaagacgaaaaaaaatataaaaaaataaagaataaaggacggatagaagaacttctctctaagaaaaataaaactcctgccgaggaagcggagtttaaagctattgatgaaagagacaaatatctcgttgcctcctatagagttcctttaaacgagtttggtttggatcgcatgggaacagataacagttatagcaacgattacaccaatgtggcacgcatgtggcaatgctgtgaacaaaaaaaatacgccatttacgtacccggtatgggaacggataacctaatgcgcgacagtacagatggttttgcttttggttcaggacaaacagggatacgagccagagtgcgtaacgcttgtgaacagattgcagataaagtagcacagaagttggacggaagttccgaagaaactaaacttgcccaaatcacactcgatgtatttggattcagccgaggtgctgctacggcaagaaacctggtctacgaggtaaaccatgatagtggttacgcaaatgccttaaaaaaacaaatcccttgtggagtagaatatattgaaaggccatattcggaatccggtagtgtacgcatacaaaaaatgcgaacagcctttgttgatgtcgataattatgagataaacaataagtatttagtaggagatcagctgcctaagatggggcatttgggttacaatttactaaaaaaaacgagccttgattttcatgatttaaaaaatgtagagatcatcgtccgtttcgtggggatttatgataccgtttcctcttattttgaggagaatggtgttcgggatcattacgacgattatggaaatgtgaaagacgaaggaggcaagctcctgaaagaagcctggtcaacgcattttaatgatgatattgccgagctgcacctgaataatttatactgccaaaaagtagtacactttacagcaaaagacgaacaccgtcaaaattttgcccttacccgaatcaatcaaattcccggcagatacatcgaaaagaattttccgggagtacattgcgatataggtggagcttacatgaccgagaaagaagttgttgatgaaatcggaactcaaatgaaagacagacattatgtttctgtttttccaaatggtttttttgatgataaaatggggttagaggcactaagaagagacctgatcagacagtattggtataaagaagatcaaatcgaaaaaaaaattcaatggagttttccaccttatcataaacttacaggaacccgtggaaaaaaaatagaaggcaccgaagatcagtatgaaggcgttaaaaaagagtacagttatattccgctgcactttatggaaacgtatgccaaaagtactgaaatgaagcagtattttgtagaagaaacaactgtgaaatttccattagatgattttctaacagatgtagaaagctatttaacaccttatgcactggatgaaaccaacgaggtgaaagaatgggatttcatcagtgacgaagtaatcgaacaaagaagactggaaaggatagaaaagcagagatgcgaagcggaaatacaaagtatagagcaaaaactcaaaaatcatacttatgaatacgaagagcttaaaataccaatcgacaatttacgggtagaacaatataaacctaaattagactttgagacgcttaaaataccacaaaaagagcctgaaatgaaaacatatactatagagggagttactgttgttggttacagctcacaaaccatgttgagaaagttaaggaatgaatacctgcattggtcctcaacaagagattggttcgggatgcagcccaatgaaggcagaaaaagaaaaatacattaaagtatgacctatttagattacgatgttgtatttcctgagcttgataaaataaatgagtttgtatttgaaacggtaacaacagatttctcgaatccaaaaaagataaaaaaaataaattacacccgaaagattgctatcacgaggtacaaagacaacggaaatgataagttgtttcagttgtttctttccgagatcgaaatcacaagtaatttatctacagagaatattatttttcttaaaagaataggagctgcttttgacgaagttgaagtagaagtaaataactatggtaaaataatcaaaatagtaaactttgaggaactgggaaagcgatgggaaattgttcgtgccaaattggctatagataatgttggttttgttacagaatcatacctgcaggatattagcagttcggtagaagacgagcaaaaaatgataaccttcttctccgattataaaatgtttggtttgtatttttttagtttatatagaaacccgtctcctattgagcggcaaaaaaaaataatagattgtgggagcactgtaatgttggaacgcatttatccaaaagatgaaaaattggacacctacttcatatcaggaaaaccttttggagagaatgcagagacagatagcataaaatatgatggtactgtagagtacagagaacatcagatagaattgacaacattagaaatagaaaaagaaagattgagcattttgtataacattaataaaacatcactttaatggcaaaaccagataatactcaaaaacgaaaagaacgcgaggaaaaagaggaagccgaggatggcttaaaatttgttatcgacggagccaaattaaaatgtgacttatgtaccgttccggagggcgacttaaaagtaaattttgacacacctactatacaagacaaaaaagtagcaacgattgtcgagaaagacaaaaagagtgtaatctttaaaggcaactgcaaaaaaagccctcagagttcaagtccatgcgcttcagtaatgcagcttgccgactggaaagaggtgggaacagtgtattttcaggaaaaatttccattacttcttaaaagtacgattaaatgcaattatggaggagtcgatattaaaattacagactctgcacaacgcaatgcaccggaaaagattgatacaacaggggcgcctgtgccagatttagaaaaaagaattgtagaactttactggacgtataatgacaccaaattagctaaaaagtcgagattttatgtagacatgaatttggttgtaaagaccttgaattataaagaaggggagagtgtcacagtatctataaaaagtgaagatgggaaaccgttgacggataatttaactgaattaaatcttacaggaactgttggtaaaagtgatactgtaatttttgaaaaggtcctaaaagactacactctaaatttattagaaacagataattaaggaggaaaaaaaaacgaaaataaagcaagtaagaaaaattatggattttgaaaagataattccaatagaattaatgcaacgtaatattgtagctagtgttgggggtgttcaggcaagggtagtagcagccacaagaccaaaatgggatgatatgataaagaattatccaaacacatcggtagatacagttaaactttataatgatataggtaatggtttaatagatttatacaaaaaagcacccgaagattgggaaaacacttgttcttttaggatgagtagagggttaaatttaagtggtttcaaacttccaaaagataattcaaaatatagagaaaaaggttctagcggtggggtacatgtaggaacaagtacgggagtgacaaaaaactattattggtatagagtaaaagaattgggaaaatatttagaagaccatttaggggctcctgagtttgatgtaacacttaagagagctaatttaggcgaaataaaagttggtgtgtcaacaacagattggagtaagctcagtaaactgaaaggaattgttatgtttaaagtttcaggatggggaaatgcttcagggcattttactttgtgggatggtaaaaacttaatatatcccggagatccacgtcatgatgatccttctagtgagctttattattttaatatgaaatatgaagcctatcatcctatcaagaagaaaaatattgttatacaaacagatgaaataaagttatgggaattaaaataaaaaagaataactatttattgttatttgtgcttttaatttttacaaaagcaatagggcagaataaagtagcagaaataaaaaaatatgcttttaataaatgtttaagctacaattatcaaaaaattgattcaaccttttataacacttataaagatgcttcgggagttcaaatttcaataaacggtaattttttagaagatgatgagcttaaaaataaagtaatagattatgttattgcagtaactggtttgtattattctcagaaaaataatttgcactttgagaccggagacagaaatattgttctttgtaattgttttgctttttatgaatccaaaggtttggatttatttgtgaagaaaatagttaatgttaaagataaaattcgaaaaaagtaaaattgcaatattaataagttatcattctgccactgtttatcagttcagtttagtctaaatataaaaatgataaaaattttcttgaaaaataataaatagagaggattcgtttgtataatatgtaattttttaaaatgcaatatttttgctaattttcttaataaagctttgagtttttcttattttagcaattttataaatgaaggaaaatttttaataaaatgaatttaaggcgttttgaagttcttttgaagtttacacaagaacaacgtaaaggtgtttttttactctttattattatagctgtattgcaggcggtttactttcttgttgatttcgatatttcggagaagattgttcctgaagaaaagcagtggatgaatttgcaatccgaaatagattctttaaaatttttaaagtctggagagaaaagaaaggtctatgcttttaatccaaatttcattaccgattacaaagcgtacaaattaggaatgtctgtccaggagatcgatcgtctgctggcgttccgaaaagagaacaaatatgtaaattcagcaaaagaatttcaggaagtcacaaaaatctcagattctttactgagagtgatttctccgctttttaaatttccggagtgggttaccaataaatcaagtcataagatcaaaagaaatgagttttttaaaaaacctgtttatgaaaaagaggaaattatagtacaggatatgaatagtgctactcaggaagatttagttaagatatatggtataggggaagctctatcgataaggatccttaagcaaagagaagttttgggaggttttgtttcgatggaacagatgaatgaggtttggggactttcgccagaagttgtaaaagaattgactgcgcattttaaagtagcaattcctccctccttaaaaaaaatcgccataaacgaagcctctttaaaagagttggcaaagtttccttacttccgatatgcattggccaaggagattgtgacctatcgaagtatgaatgggaatattaataatattgaggatttgtcaaaaattaaaggttttcctattgaaaaagcaaaaataattagtttatatttggagttctaaaaaaaaacagaattacaatggattttcaatataatgaaacgcagttgatgattgcgcagtcaataaaagattttgctgagaaaaatatccgtccaaatatcatggaatgggatgaatctcaaatttttccggtttccctgttcaagcaattgggagaaatggggtttatgggagttttggttcctgaagagtatggtggttccggtttagggtatcacgagtatatcaccgttgtagaagagattgcaaaagtagatccatcaattggtttatctgttgcggctcataattcattatgcaccaatcatattttgacttttggtaacgaagaacaaaagaaaaaatggctgccaaaacttgcaacagcagagcatattggagcctggggattaaccgagcacaataccggttcagatgcgggaggaatgaatacgaccgcagttaaagagggtgatgaatggattataaacggagccaaaaacttcattacacatgctatttcaggagatattgcggtagtaattgttcgcaccggtgaaaaaggtgattcaaaaggaatgacggcttttgttcttgagaaaggaatgaaaggctttagttcaggaaagaaagaaaataaattgggaatgcgtgccagtgaaactgccgagttggtttttgacagctgtcgcgttccggatgcaaacagattgggggaagtaggacaaggatttgttcaggcgatgaaaatattagacgggggacgaatttcaattggagcgttatctttaggaatttcaaaaggagcttatgaagcggctttgaaatattcaaaagagagataccaatttggtcagcctatcagtaattttcaaggtatatcttttaaattagctgatatggctaccgaaatagaagcgtcggagttgttattgcataaggcagcctatttaaaacaacaacataagccggtgacaacattaggagctatggcgaagatgtatgcttccgaagcttgcgtgaaaattgccaacgaagcggttcagattcatggaggttacggttatacaaaagattttccggtagagaaattctacagagattctaaattgtgtaccattggagaaggaacaaccgaaattcaaaaagtggttatttccagaaatttgttgaaagagtaaagagtaaagagtaaagagtaaagagtaaagagtaaagagtaaagaatgcagggtacatagtattgaagtctttgttctttgctctatattctattctctaaaaaaaatcacgggatgaagaatgcaggatacgcagtattgaagtctttattctttgctctatattctattttctaaaaaaaaaagcacaatttatggctcataattcataattaatacatacttttgcagccttaacgagaggaggtgtcaatattatgttaattataccaattaaagacggagaaaatatcgatagagcattaaagcgctataaaagaaaatttgataaaacaggaactgttcgtcaactaagagcacgtactgcttttattaagccttctgttatcaaaagagctcaaattcaaaaagcggcttacatccaaacattgagagatagtttagagagttagtagtagctttttttaaaataattaccgttagttatcaaaaagaattaattttgatactaacggttttttttgtgtttaattttaagctgagttggttttctttttatcggactaacagatgttgtaagaattgtgtttttatgaaatcaaatatagaggcgtttcgtgattatctggagttggagaagaagtattcggttcatacggttacggcttatttgaatgatgttttttcttttaaagaatttaatggagttaattttgagcaagagggaattgagggggtgaattacagtcaaattagaagttggattgtttctttagtggatgagggtgtttcgaatgtttctgtcaatcgaaaaatgtcgtctttgaaagcgttttatcggtttcttttgaaaacaaagcaaattgaagtgaatccgatgttaaagcataaagcattgaaaacgcctaagattattcagattcctttttctgaaaaagagttgactgatttgttgttggaggttggtgatccttgtgggtttgaggaggttcgtgacaggctcattgtggatttgttttatgccaccgggataaggagggctgagttgattcatttaatgaagtgtaatgttgatttgtcatctggtttgttaaaggttttagggaagagaaataaagagcgtattgttccgatattgccaataattgcggggcagatgaaattgtatttacaggaaagggctttgattgaaaaggtggtagatgaggattatttttttatttcaggcaaagggttaaaattgagtgaatcttttgtgtatcgattaataaattcttactttagtaaagtctctgaaaaggtaaaaaagagtccgcatgtgcttcggcatacttttgcgactcatttattaaataacggagcagatttaaattcagttaaggaattattggggcattcgagtttagcgtctacacaggtttatactcacaatagtttagcggagcttaaaaaagtgtatgcaaatgcgcatcctaggaataaacaatagttctgaaatgtttaaccctaaaatttgtattatgaaggtagatgttcatgcagttaactttactgttgacagaaaattggtagattttattcaggagagaatgggtaaattggagaaatattatgatcgtgttgtttcggcggatgtttttttgaaagttgaaagaacaagtgataaagagaataaagcagtagagattaagattaatgtaccgggggatgattttttggttaaaaagcagtgcaagacattcgaagaggcagttgagctttcagcagaatctttagaaagattacttgttaaaaggaaagaaaaaataagagcacatatataattgaaatttttttcaaaaaatgttttgattcaaagataaaatagctacatttgcagtccgttagaaatagcggacttttttaatgcaattgccgatgtagctcagttggctagagcagctgatttgtaatcagcaggtcgtgggttcgagtccctctatcggctcaaaaatatttcaaatgcgatttgaaattggttcttaaaaaatattgaaaaaggtttgtggttagtagggtgaggtttttaggttagatctaaaatcggaattctgaaatcataaattattaaggggagatactcaagcggccaacgagggcagactgtaaatctgctgtgtgaacttcgcaggttcgaatcctgctctccccacaaataaagaagaagttaaggttttgggctatcggtttcgggtttttaaaagctgagatctaaatctaaaagtcagaactctctgccgacttagctcaggggtagagtgcttccttggtaaggaagaggtcacgggttcaattcccgtagttggctcaagtaagtaggaaattgaaaattaatatataactaagattaaaaattaagtaaaatggcaaaggagaattttaatcgttccaaaccgcacttaaacataggtacaattggacacgtggatcacggaaaaactacattaactgcagcaattacaaaagtattgtctgatgctggttactgtcaagcaaaatcgtttgatcaaatcgataacgctccagaggagaaagaaagaggtattactattaatacatcacacgtagagtatgaaacagctaaccgtcactacgctcacgttgactgtccaggtcacgcggattacgtaaagaacatggttactggagcagctcaaatggacggagctatcttagtagttgctgctacagatggtccaatgccacaaactcgtgagcacatccttttaggtcgtcaggttggtattccaagaatcgttgttttcatgaacaaagtggatatggttgatgatgctgagttgttagagcttgttgaaatggaaattagagatttattatctttctacgaatatgatggagataatggtcctgtagttcaaggttctgctttaggaggattgaataatgatcctgcttgggtaccaaaaatcattgaattaatggaagctgttgatgcttggatcgaagagccagtgcgtgacgtagcaaaaccattcttgatgccggttgaagacgtatttacaattactggtcgtggaactgttgctacaggtcgtatcgaaacaggtattgctaatacaggagatccagttgaaatcattggtatgggagctgataaattaacttctactattacaggagttgagatgttccgtaaaatccttgatagaggtgaagctggagataacgtaggtttattgttaagaggtattgataaagaatctatcaaaagaggaatggttatcattaagccaggatcagtaaaaccacacgctactttcaaagcagaggtttatatcttgaaaaaagaagaaggtggacgtcatactccattccacaataactaccgtccacagttctacgtacgtacaactgacgtaacaggagttattactttaccagaaggagtagagatggtaatgccaggagataacttgactatcaatgttgctttattaagcccaatcgctatgagtgttggtttgcgtttcgctatccgtgaaggtggtagaactgtaggagcaggtcaggtaactgaaatcgtaggataatcctataaaaaataaaaaaaaagccagctgattttcttaattgaaatcactggcttttaaatacgggcgtagttcaagggtagaatagcggtctccaaaaccgttgatgggggttcgaatccctccgcccgtgcaataataaaatatatcaaatgacaaaagttactaattatttatcagaggctttcgaagagttaaagtcaaatgttacttggccagcttgggctgaggttcaaaaattgacaattgttgtagctgtattttcgattctgttcgctttggcaacatggggagtagacgaattttttgcaaaagctttggctggattttttaactggttaaaaggataattttttttgtgatggcagataataatgtgaaaaaatggtatgtggttagagctgtaagcgggcaagaaaataaagtcaaagcttacatcgaaactgagattgccagattaggtatgggcgattatgtttcccaagttttagtacctacagaaaaagtagttactgtaaaagaaggaaagaaaatgtctaaggataaagtttatttccctggatatgttatgatcgaagccaatttagttggtgagatacctcatattattaagtcaattactagtgtaattgggtttttaggtgagatcaaaggcggggaaccggttcctttgagactttctgaagtaaatagaatgttaggtaaagtggatgagttggctgttaatacagatactcgtgctattcctttcagcctgggtgaaacggtaaaagtgatcgatggtccttttaacgggtttaacggttcggttgaaaaaatcaatgaagaaaagcgtaaacttgaagttatggttaagattttcggaagaaagacaccattagaattgagctttatgcaagtagaaaaagtataattttttgttacactataataaaccattgtaatcgcttccattgattacagtgataaattttttaaaaatggctaaagaaattagtaaggtagttaaactacaagttaagggaggtgctgcgaacccgtcgccaccggttggacctgctttaggagctgctggggttaatatcatggagttctgtaagcaatttaatgctagaactcaggataaacctggcaaaatttgcccagtgcaaatcactgtgtataaagacaaatcatttgattttgtcgttaagactcctccagcagcagttcagttaatggaagctgcaaagctaaaatctggttctggtgagcctaatcgtaaaaaagtagctagcgttacttgggaacaaattagaactattgctgaagacaaaatgccggacttaaacgctttcacaattgagaaagctatgagtatggttgctggaacagctagatctatgggtataactgtatcaggagatgctcctttttaattaagaaaaagacatggcaaaattaacaaaaaagcaaaaagaggctgcttcaaaaattgaaaagaacaaattatactctctaaaagatgctgcggcattattgaaagttgttgcttctgcaaaatttgatgagtctgttgatatcgcagttcgtttgggtgtagatcctagaaaagcgaatcaaatggtaagaggtgtggttacattacctcacggaacaggtaaagatgttaaagtattagcattagttactccagataaagaagcggaagctaaagaagctggagcagactatgtaggtcttgacgattatttacaaaaaattaaagacggttggactgatgttgatgtaatcatcactatgccagctgttatgggtaaattaggtccattaggtcgtattttaggacctagaggtttaatgccaaaccctaaaacaggtactgtaactatggatgttgcaaaagctgttgcagaggttaaagctggtaaaattgactttaaagttgataaaactggtatcgttcacgcaggaattggtaaagtttcttttggagctgagcaaattgttgacaacgcacacgaaattattcaaacattaataaaacttaaaccaactgctgctaaaggtacctacattaaaggtattcaccttacaagcactatgagtcctgctattgcattagacccaaaagcagtataattggtagttaaaaatttttagtatgactagagaagaaaaatcaatcgcgattgaaaatttaactgcgcagttagctggtacaaatatcatttatgtatctgatatttctggtttaaacgcagagacaacttcaaacttacgtagagcttgttttaaagctggaatcaaattagaagttgttaagaacactttgcttgcaaaagcaatggaagcttctgctaatgattatggtgatttaccaacagttttaactggtaacagtgctatatttatttctgatgtagctaatgctcctggaaaaattatcaaagatttccgtaagaaatctgataaaccagttttaaagggtgctttcattaataatgaaatttacattggagataatcaattagatgcattagcaactattaagtctaaagaagaacttcttggagaacttatcggattattgcaatcaccagctcaaagaattatttctgctttacaaaacaaattcgctggtagcgaagaagaaactgaagcataataattatcgcagggagtttattctccttgctgcttaaatagcgcacaataaacaaaatataattttacaaatcattttaaacgatagaaaaaatggcagatttgaaacaattcgcagaacaattagttaacttaacagttaaagaagttaacgaattagcaacaatattaaaagacgagtatggtatcgagcctgctgctgcagctgtagtagttgctgctggtggtggagaaggtactcaagaagaagcacaaactgaatttacagttgtattgaaagaagctggagcttctaaattagcagttgtaaaattagtaaaagaacttacaggtttaggtcttaaagaagctaaagatgtagttgacggtgctccaagtaacgttaaagaaggtgtttctaaagaagaggctgaaggtcttaaaaaatcattagaagaagctggagctgtagttgagcttaaataatttaactcagttttaagaactaggtttaggtcctgagttaacactcaaaggcctaaaccatttttcgtataataaaatacattaaattttattatcaaatagtttaaaatacggaagagtttttgatcaatacgaagaaaaaaaatggaacttggtttatccggtttatttttaaagatgtgttgattctaaaaagaaagtataaactaaacaatgtgttttacacaaaaaactacttttttttaatcaaaattttgttcattgatgataacaaatcagactgaaagattgaattttgcctctacaaaaaatattcctgactatccggattttctagatgttcaggttaaatcttttaaagatttttttcaattagaaactaaatctgacgaaagaggcaacgaaggtctatacaacaccttcatggaaaactttccaattacagatacaagaaacaactttgtattggagttcctggattattttgtagacccaccacgttatacaattcaagaatgtatagagagaggacttacctatagtgtgcctttaaaagccaggttaaaactatactgtacagacccagaacacgaagattttgaaactattgtacaagatgtttatcttggaacaattccttacatgacaccaagtggtacctttgtaattaatggtgccgagcgtgtagtagtatctcagctacaccgttctcctggggttttctttggacaatcattccacgcaaatggaacaaaattatattctgccagagtaattccttttaaaggatcctggatagaattttctacagatattaacagcgttatgtacgcgtatatcgatagaaagaaaaaattaccggtaacaactttattccgtgctattggtttcgaaagagataaggacatccttgaaattttcgacttagctgaagaaattaaagtttctaaaacaggtatcaaaaagtatattggaagaagacttgctgcgcgtgtattgaacacttggcacgaggatttcgttgatgaagataccggagaagtagtttctatcgaacgtaacgaaatcatccttgatcgtgatactattatcgacaaagataatgtggaagagatcatcgattctaacgttaaatctattttgttacacaaagaggataataatcaagctgattatgctattatccacaacacgttacaaaaagatccaacaaactctgaaaaagaagctgttgagcatatctacagacaattgcgtaatgcagaaccgcctgatgaagaaactgctcgtggtattattgataaattgttcttctctgatcaacgttataacttaggtgaagttggtcgttacagaatgaacaaaaagttagatttagatatccctatggacaagcaagtgcttaccaaagaagatatcattacaatcgtgaaatatttgatcgaattgatcaactcaaaagctgagattgatgatattgatcacttatcaaaccgtcgtgttagaacagttggagaacaattgtctcagcaattcggtgttggtttagcacgtatggcgagaactattcgtgagagaatgaacgttagagataacgaggtgtttacaccaattgatttgatcaatgctaaaacattatcatcagttatcaactctttctttggtacaaaccagttgtctcaatttatggatcaaacgaatccattagctgagattacacacaagagaagactttctgcacttggaccaggtggactttcgagagaaagagctggtttcgaggttcgtgacgttcactatacacattatggtcgtttatgtccgattgaaactcctgagggaccaaacattggtttgatttcatctcttggtgtttatgcaaaagtaaacggaatgggattcatcgaaactccataccgtaaagtaactaatggtgtagttgatttagaaagtactccaatttacttaagcgctgaagaagaagaaggaaaaatgattgctcaggcaaacattgaaatggatgagactggtaaaattacggcaactaatgttattgctcgtgaggaaggtgacttcccggttgttgaaccttcagtggtacattatacagacgttgcacctaaccagattgcttcgatttcggcttcgttaattcctttcttggaacatgatgatgcgaatcgtgcgttgatgggatctaacatgatgcgtcaggcggttcctttgatccgcccggaagcaccaatcgttggtacaggtttagagcgtcaggtagcttcagattctagagtattaattaatgctgaaggagatggaactgtagaatacgttgatgcaaatatcattactatcaaatacgaccgtactgaagatgaaagaatggtaagttttgatgctgatgagaaaacgtacaacttaattaaatttagaaaaaccaatcagggaacaagtatcaacctgaaaccaatcgtaagaaaaggtgacagagtggttcttggacaagtattatcagaaggatatgctactcaaaatggggaattagctttaggtagaaacttaaaagttgcgttcatgccatggaaagggtataactttgaggatgcgattgtaatttctgaaaaagtagttcgtgatgatatttttacttctatccacgttgatgattattcattagaggttagagatactaagttaggaaacgaagagttaacaaacgatattcctaacgtttctgaagaagctactaaagatttagatgaaaacggtatgattagaattggggcagaggttaagcctggcgacattttgatcggaaaaattacaccaaaaggagaatcagatcctactccggaagagaaattgcttcgtgcaatcttcggggataaagcaggtgatgtaaaagatgcttcattgaaagcttctccatctttacatggtgtagttcttgacaaaaaattatttgcaagagccgttaaggataaacgtaaacgtactcaggataaagatgctttaggcgctttagaaatggaattcgaaactaaatttgttgaattaaaagacagattagtagagaaattattcctgatcgttaacggaaaaacatctcagggtgtaatgaacgatttgggtgaagaagttttaccaaaaggtaaaaaatatactcaaaaaatgctttacgcagttgaggattttgctcacttgagcaaaggtcaatgggttgccgatgacgctacaaataaaatggttaatgatttaattcataactataaaattaagctgaacgacttacaaggatctttaagaagagagaaattcactattacagttggagatgaattaccatctggaatcttgaaattggctaaaatctatatcgctaaaaaacgtaagttaaaagtaggtgataaaatggcaggacgtcacggtaacaaaggtattgttgcaagaatcgttcgtcatgaggatatgccattcttagaagatggaacaccggtagatatcgtattgaatccacttggggtaccttctcgtatgaacattggtcagatttatgaaactgttcttggatgggctggtatgaacttgggtagaaaatttgctactccaatttttgacggtgcttctttagaccaaatcaatgctttgactgatgaagctggagtaccacgtttcggacatacacacctttatgatggtggtaccggagagcgtttccatcaagctgcaactgtgggtgtaatttacatgcttaaattaggacacatggttgatgataagatgcacgcacgttctatcggaccatactcattgattacgcaacagccacttggaggtaaagctcaatttggaggtcagcgtttcggagagatggaggtttgggcacttgaggcttatggagcttctagtacactacgtgaaatcttaacggtgaagtctgatgacgttattggtagagctaaaacttacgaggctatcgttaagggtgaaactatgccagaaccaggtttaccagaatcattcaatgtattaatgcacgaattgaaaggtctaggtctagatcttcgtttggaagaataaataaaagttttcagtcgcagtctcagcattcagttacaactgaaaactgagactgctaactgttactaataatgttagaagtttttaaagatttatacccgtaacccgttccgattttttatagtaatgcaaggtattctataactagcgcttcaaattaaattttgaagttttgagaagtaacccgaggtagtgttttaagtcgaaagtttgaaagtccaaagtctaaagtcagcaatgactttaaaactttatgacatttgactttagactagactaagaatcaattttttaattgcaaaataaatcaatagtaaaaactatgatgaataacagaaacaataaagacaaaaatccagtaaaaagatttaacaaaatttctattggattggcttcaccagaatctatcctgaaagaatcaagaggagaggttttaaagccggaaactattaactacagaactcacaaaccagagcgtgacggacttttctgcgaaagaatcttcggaccagtaaaagatttcgaatgtgcttgtggtaagtataaaagaattcgttacaaaggtatcatttgcgaccgttgtggtgttgaagttacagagaaaaaagtacgtcgtgacagagtaggacacatcaatcttgttgtgcctattgctcacatctggtatttccgttctcttccaaacaaaattggttatatccttggtcttccgtctaagaaattagatatgatcatttactacgaaagatatgtagtaattcaagcaggtattgctaaaaatgcagatggagaatctttacaaagattagatttcttaacggaagaagaatacttaaacattttagatactcttccgcaggaaaaccaatatttagatgatttagatccaaataaatttgttgccaaaatgggagcagagtgtattatggatttattagctcgtattgacttagatgctttatcttatgaattgagacacagcgctaacaacgagacttctaaacaaagaaaaacggaggctttaaaaagattacaagttgtggaatctttccgtgagtctaacttaaaccgcgaaaatcgtccggaatggatgattatgaaagtggttccagttatcccaccagaattacgtccgcttgtaccacttgatggaggtcgttttgcaacttcagatttgaacgatttatatcgtcgtgtaatcatccgtaacaaccgtttgaaaagattaatggagattaaagctcctgaagtgatcttgagaaacgagaaacgtatgttacaagaatctgtagattcattatttgataacactcgtaaagcttctgctgttaaaacagaatcaaacagaccattaaaatcattatctgactctttaaaaggtaaacaaggacgtttccgtcaaaaccttttaggaaaacgtgtggattattctgctcgttcagtaatcgtcgttggtcctgagttaaaattatacgaatgcggattgccaaaagatatggcttctgaattatacaaacctttcgttatccgtaaattgattgaaagaggtattgtaaaaacagtaaaatctgctaagaaaataatcgataaaaaagagccggtagtttgggatatccttgaaaacgtaattaaaggacacccggtattactaaaccgtgctcctactttgcacagattaggtatccaggcattccagccaaaattaattgaaggaaaagcgattcagttacacccattagtatgtacggcgtttaacgcggattttgatggtgaccagatggcggttcacttaccattaggaccagaggctattttagaggcacaattattaatgttggcttctcacaatatccttaaccctgcaaatggtgctcctattactgtaccttctcaggatatggtcttgggtctatactatatgaccaaagagcgtatttctacagaggatcacattattttaggtcaggatttgactttctattctgctgaagaagtaaacattgcattaaacgaaggaagattagaattgaatgctcgtgtgaaaattagagctaaagattttaatgaggctggagaattagtgtaccaaattattcaaacaactgcgggacgtgtattatttaacgaagtagtacctgaagcagccggatatatcaacgacgtattgactaagaaaaaccttagagatattatcggacacattttaagtgtgactgatgtacctacaacggcagctttcttggataatatgaaagatatgggttataaatttgcatttagaggaggtttatcattctctttaggtgatattagaatcccggaacaaaaaacgaagttaattgcagatgccagagagcaagttgaaggtatctcaacgaactataacatgggtcttattaccaataacgagcgttacaaccaggttattgacgtatggacttctgcgaatgctcagttaacagagttagcaatgaaaaatattagagaagaccaacaaggtttcaactctgtatatatgatgcttgactctggggcgaggggttctaaggagcagattcgtcagttaacaggtatgcgtggtttgatggctaagcctaaaaaatctactgccggtggtggtgagattattgaaaacccgattctttctaactttaaggaaggtctttcgattcttgagtacttcatttctactcacggtgctcgtaaaggtcttgcggataccgctcttaaaacggcggatgctggttacttaacaagaaggcttcatgacgtttctcaggatgttattgttaacatcgaggattgtggaactttaagaggtgttgaagtttctgcattgaagaaaaatgaggaaatcgttgaatcattaggagaaagaattttaggacgtgttgcattgcaagatgttattaatcctttaactaatgaagtattagttcaatcaggtcaccaaattacggaggctattatgaagactatcgaagcttctcctattgaaagagtagaagttagatctccattaacttgtgaggctttaaaaggtatttgtgctaaatgttacggtagaaacttagctaccggtaaaatgacacaaagaggtgaagctgtcggagttattgcagctcagtctattggagagcctggtacacagttaacacttcgtacgttccacgttggaggggttgcaggaggtatctctgaagagtctagtattgttacaagattcgcaggtagacttgagattgaagatttaaaaacggttaaaggtgaggacagcgaaggtaatgcggtagatatcgtagtatcacgttcaactgagttaaaattagttgatgagaaaactggaatcgttttaaatacacataatattccttacggttctagtatctttgttaaagatggtgaagctgtagctaaaggaactgtaatttgtaagtgggatccatataacggtgtaattgtttctgaatttacgggtaaaattgcttacgaagatttagagcaaggacaatcgtacatggttgaaattgatgagcaaaccggattccaggagaaagtaatttctgaggcgagaaacaaaaaattaatcccaactttattggtttacggtaaagaaggtgaattgattcgttcgtacaacttaccggtaggtgcacacttaatggttgagaatggtgagaaaattaaagcaggtaaagtattagtgaaaatccctcgtcgttcttctaaagcaggcgatattacaggaggtcttccaagaattaccgagttgcttgaggctcgtaacccttcaaacccggcagttgtttctgagatcgacggtgttgtttctttcggtaaaatcaaaagaggtaaccgtgagatcgttatcgaatctaaatttggtgagattaaaaagtatttagttaaactttcaagccagatcttagttcaggaaaatgacttcgtaagagcaggagtaccattgtctgacggtgcaattacaccagatgacatcttaagaattcaaggaccggctgctgttcaacagtacttggtaaatgaaattcaagaggtataccgtcttcaaggggtaaaaattaatgacaagcactttgaggtagtaattcgtcaaatgatgcgtaaagtaagagttcaggatccgggtgatactttattcttagaggatcaattaattcacactaaagatttcatcgttcaaaacgataaattatacggtatgaaagtagttgaagatgctggtgattctgcggtattaaaaccaggtcagatcattactcctcgtgaattacgtgatgaaaactcattgttgaaacgaaatgataaaaatctggttgtagccagagatgtaattactgcaactgcaacgccagttttacaaggtattacaagagcttcgctacaaactaaatcattcatttctgcggcttcattccaggagacaacgaaagtacttaacgaagctgctgtagctggtaaagtagatgatttagaaggattgaaagaaaatgtaattgttggacacagaattcctgcgggaactggtatgagagaatacgataacactatcgtaggatctaaagacgattacaatgaaatgatggctaataaagaagaatatatttattaatattaggaacctatgagtaatccgaaccaacaacaagaacagattaatatcgagttagatgaaactattgcagaaggaatttattctaatctggcgattatcaatcactcatcatcagaatttgttttagattttgtgagtattatgcctggtattcctaaagccaaagtaaagtcaagaattgtcttgacaccacaacatgctaaaagattattaaaagcaattggtgaaaatattcatcgttttgaagtcgctcatggcgaaatcaaagagacagaacaagctccaataccgcttaattttggtcctgcgggacaagcataaactttaaaagccccagtaatggggctttttttatggaaaaaactaaatttttaaggtaaattttggttcagtacaaaatgttaggagtggatagaagttattcctttattaacgatttcagctcttcatttaagagagcattttgttacgactgattttataattagtgttctctaccggtatgactatttgaaatatttaaaaatgggctgaaaacctaaaagcataaaaatagtgtaacacactataaattaagataatgacatattgccctgaaagagtataagcaattacaggaaagtcaggtaaagaaagttttgatgacttttaccactgtgataaaacggatgtgtgaattttgtcaatcgctacaaatcctggtgcatttgtgagtaaagcaatcaagaaatgctgttcaacggatatatttttactttcgtcgacaaaatttcttgttgtaaatgaattgtgctagcttgcgatcgattatataaaaagataatattttttggagtataaaaactaattaaggttggattaattcaaattaaaaaaaagcgctaattgtaaaaaattagcgctttttttatagctgaaattttgaaatttcttagtcaaattccgaagtgaagaacagttttacacttgggtatttgctttgtgtcatttgtatcgtgaagtcagaatcagccaggaataccaactgaccatatttatcatgtgcaaggaatttttgtttgatacgcttaaattctttgaattcatcattttttgcatcatcaggttttacccagcaagctttgtgaaccggaaagttttcataagtacattttgcaccatattcgtgctctaaacgatactgaattacctcgtattgaagcgctccaacagtaccaattactttacggttgttcatttctaaggtaaacaactgcgccacaccttcatccattaactggtccacacctttgtctaattgcttagccttcataggatcggcattgttaatgtatcggaaatgttcaggagagaaacttggaattcctttgaaactcatgatttcgccttcggttaaggtatccccaattttgaaatttccggtatcgtgcagtccaacaatatctcccggataagaaatgtctacaatttcttttttctctgcaaagaaagcattcgggctcgagaattttaaatttttcttttgacgaacgtgataataaggtttgtttctttcaaaagttcctgaaacaattttaataaaagccaaacggtctctgtgtttaggatccatattcgcgtggattttgaagacaaaaccggacattttttcttctttcgggtccaccaaacgggtttcagaatcttttggtcttggagacggagcaatggtaacgaaacaatctaacaattcacgaactccaaaattgttcaaagctgaaccaaaaaagacaggttgcagtttaccatctaaataatcctgacgatcaaattttggatatacttcgtcaatcagttctaattcttcacgaagtttttcagctgctttttgacctacaattttatctaattccggattgttctgaacatcagagaaagcaattgtctcttcaatatttttacgactgtctccactaaaaagattgatattttcttcccaaagattataaatcccctgaaaatcataccccataccaatcgggaaacttaaaggtgtaaccgtaagtccaagcttttgttctacttcgtccatcaaatcaaaagcatcttttccttcgcggtctaatttgttgatgaaaacaatcataggaatgttgcgcattctacaaactgcgactaacttctctgtttgttcttcgacccctttagcaacgtcaattacaacaataacactatcaacagcggttaaagttctaaaagtatcttcggcaaaatccttgtgtcccggagtatcaagaatgttgatttttttgtctttataattaaaagcaagtactgaggttgaaaccgaaatacctctttggcgttcgatttccatgaaatcgctcgttgctccttttttaattttattgttttttacagctcccgcttcctgaatagcacctccgaacaacaataatttttcagttaaagttgttttaccggcatcaggatgcgatataattccaaatgttcttctgcgttgtatttcttttaaaaagctcatatttcgtataaataggttgcaaaagtactattaattacggcttaataaaaatattcacttcttaaattgggaacctcattacaatattgagcaaggatgctgtaaattttaccaccggtcagattttttgatacaagactttgtcgtgggtgctcttctattctcttctattactctattttgcttttagttcaggaagaaattacatctataatgggataagttagaagcttatacaaacaaaaaaggaataattaagtattgtactggataaatacatttgacttttcagttgtattgttattatttaaaatttgattcaggcaagattctcaacatataatactaggaaaataccaatatgccttgatctagagaaaaagttggctatttgtagtttacccccccccttatttctttttaaaacagcaaacttgctaccagatattacattaaacctgtcggttatttcatacatatatacgcatatgcttctattgataatggtagaattttattgtttgtattttcgtgttaaataatgttaaaatacagaggtttaaaacctcaattactcagtttttaaaaaagaattatttatgaagaaagaattattatggatgtatttatgcttttttggattggttactcattcttatggcaatataaatacaataaacaatgtgacggcatttttatcctaccccgtaaagccagattggctaaaattagaggtaaataacacttcgacagcttataattataggccgtcgcttttaggtttagatgagtttaccggtgataggaatggaaatatctattttcaatggtatgattctgatactgtaaccaatttaactggtgctaaaactgaccaaactggggctacagtttcgactattctgaggacttatcctgctaccgtaagtggagaaactttcgataactacaattttaaccatataaacggaacgttaactatcgatggtagtaatcttcctgaaactgtgatctaccctactgctcttttgacatcaacggtgactaaaacctacggagatccggattattctccggatcctctgaattcaagtacttcttacagtagtagtaattctgcggtagccaccattgtaaacaacaaggtgcatattgtggcttctggaacagcaatcattactttagctgcttcggatgggagtacaatacagcaggttttaacggttaacaaagcgccattaagtattattgctgataacaaatccaaaaaaaatggagaaaataatccccaatttaccctttcttattcggggtttttaaatggagatactacagctagtttaactacggcccctgctgtctctactactgccggtactttaagtccgacggggacttatcctatcacagtaagtggaggaagttcagataaatatgaatttcactatacaaacgggaccatgacgattatcgatcctactattagtaaagtatcaattgtggccaacgggacaactgcttcttctacctatactggaaactatggaattgagctctcatatgacaatgacccgaacacgtattatcattctgggcccattgctaatacatctccatttatccttaactatcatcttaatggatccgcagtagtcaatagtttgagatatagcccaaaaccgcaaagcgcactaggaagagctggtgatttaggaaaggtgagaatcagttacaatacggtttcggatgccacttttcaacctctgatggattatgattttggacagttggcaacggctagaagtttcaactttccttttccgataactccgtcaaatattcgtattgaggttctagacggagccaatggttttgcctcttgttctgaaatggaattttatactgaccttatttttgagtcaatggtaactaaaacttacggagctctcgattatcggccggtagtcccgaatttaaacgaatcaaatgcctcctacagtagtagcaattctgcagtagccaccattgtaaacaacagagtacatattgtggctaccggaacatcaattattactatagtcgctccggacggaactacaacacaacagaccttaacggtaaacaaagcggcattaagtgttaccgctgataacaaaaacaaaaaatatggagctgtcaatccagacttaacactgtcttattcggggtttttaaatggagatactatagctagcttaactacggcccctgctgtctctaccactgccagtactttaagtccggcggggatttatgctattaaagcaaacggaggaatctcaagtaattacaaattttcctatatagacggaaccttaaccgttgaaggcaataaagcagcgattgtagccaatggaacgactgcttcttctgtcgatggagggaatgaaatagggctctcatacgacaaaaatttgaccacgatgtatcattccgcttactttactacaaatcctgttaccctgaactatcgtctagatggagccacggcagttggtcttttgacatacactccaagacaggacggtaacaacaacggtaatttcggaaatgtcagtatcagttacaatacgatttcagatgccacttttaagcctctgatagattataatttcaatcaagtggcgacgcctacaagcataaactttccttctacgataactccgttaaatattcgtattgtggttaaggacggttacaatggttttgcctcttgttctgaaatggaattctacgaaattccttcttttacaacaacgctaactagaacctatggagattcggattatttgctaggagctcctaatccaaacggatcaaatacctcttacagtagcagtgaccctgcagtagccaccattgtaaacaataaagtacatgttgttggtgtaggtagaacaatcataaccgctactcaggacggaactacaacacaacagatcttaacggtaaacaaagcggcattaagtgttaccgctgataacaaaactaaaaaatatggagttgtcaatccagacttaacactgtcttattcggggtttgtaaatggagatactatagctagcttaactacggcccctgctgtctctaccactgccagtactttaagtccggcggggatttatgctattaaagcaagcggaggaatctcaagtaattacaaattttcctatatagacggaaccttaaccgttggaggcaataaagctgcgattgtagccaatggaacgactgcttcttctgtcaatggagggaatgaaatagggctctcatacgacaaaaacttgaccacgatttatcattccgcttcctttactacaaatcctgttaccctgaactatcgtctagatggagccacggcagttggtcttttgacatacactccaagacaggacggtatcaacaacggtaatttcggaaatgtcagtatcagttacaatacgatttcagatgccacttttaagcctctgatggattataatttcaatcaagtggcgacgcctacaagcataaactttccctttaccataactccgttaaacattcgtattgtggttaaggacggttacaatggttttgcctcttgttctgaaatggaattctacgaaattccttcttttacaacaacgctaactagaacctatggagatctggattatttgctgggagctcctaatccaaacggatcaaatacctcttacagtagcagcgaccctgcagtagccaccattgtaaacaataaagtacatgttgttggtgtaggtagaacaatcataaccgctactcaggacggaactacaacacaacagaccttaacggtaaacaaagcgacattaagtgttaccgctgataacaaaaccaaaaaatatggagctgtcaatccagacttaacagtgtcttatagcggttttgtaaacggagatacggcagggagtcttaccacagcgccaagtgtcgcaacaagtgctgtcgcatcaagtccggcgggcagttatgatattacagtaagcggaggaacttcgggcaactacgactttacttatgttaatggtacactaactgtaaataaagcacaattaacggttacagctagtaataaatccagagcctatggagctgtcaatccagacttaacagtgtcttatagcggttttgtaaacggagatacggcagggagtcttaccacagcgccaagtgtcgcaacaagtgctgtagcatcaagtccggcgggcagttatgatattacagtaagcggaggaagttcagataaatacgactttacttatgctaaaggtacactgaccattggtaaagcgccattgaccattacggccaataataaatcaaaagcctatggagctgtcaatccgggcttaacagtgtcttatagcggttttgtaaacggagatacggcagggagtcttaccacagcgccaagtgtcgcaacaagtgctgtagcatcaagtccggcgggcagttatgatattacagtaagtggaggaagttcagataaatatgagtttacttatgctaaaggtacactaactgtaaataaagcacaattaacggttacagctggtaataaatccagagcctatggagctgtcaatccagacttcacaatgtcttatagcggttttgtaaatggagatacggcagggagtcttaccacagcgccaagtgctacaacaagtgctgtagtatcaagtccgttgggtagttatgatatttcagtaagtggaggaagttcagataagtacgactttacttatgttaaaggtacactgaccattggcaaagtgccattgactgttactgccaataatcaatcgagagcctatggagctgtcaatccgggcttaacagtgtcttatagcggttttgtaaacggcgatacggcagggagtcttaccacagcgccaagtgtcgcaacaagtgctgtagcatcaagttcggcaggcagttatgatattacagtaagcggaggaatttcagataaatacgactttacttatgctaaaggtatacttaccattggtaaagtgccattgaccgttacggccagtaataaatccagagcctatggagctgtcaatccagacttaacactgtcttatagcggttttgtaaacggagatacggtagggagtcttaccacagcgcctagtgccgcaataagtgctgtagcatcaagttcggcaggcagttatgatattacagtaagcggaggaatttcagataaatacgactttacttatgctaaaggtatacttaccattggtaaagtgccattgaccgttacggccagtaataaatccagagcctatggagcggtcaatctagacttaacactgtcttatagcggttttgtaaacggagatacggcagggagtcttaccacagcgccaagtgctacaacaagtgctgtagcatcaagtccggcgggcagttatgatattacagtaagcggaggaatttcagataaatacgactttacttatgctaaaggtacactaactgtaaataaagcacaattaacggttacagctggtaatcaatccagagcctatggagcggtcaatccagacttaacagtgtcttatagcggttttgtaaacggagatacggcagggagtcttaccacagcgccaagtgccgtaacaagtgctgtcgcatcaagtccggcgggcagttatgatattacagatggaattagccatatcgagcgttatctctttgacaaaagatcttttcttgtaatcaatctttctgatgtgttctatgacctgatctgctttagttccggcaacaatagctaccaggcaaccttttttgcctttgaatttcttgttggtcaggatagtataaagttccccctgagacaaagccacctcgtcaatggataaatgagtacccatgttttcagggaaaatcatccattggtgcgcatgttcgcgtggagcccatgtattaaatgagcttaaatgttttttgtattgtctttggagcctctttccgttaactccgaaaaagcctccaatggtatgacaatctgtagcactcttatctattaatttcttttaaaaaagccgcaaactcctgagtcatgcgagttcctttagcaactaaagtccaatctcttttgatgatttccccgttggttttattagtccaacgacgtcttttgatgtgtaaatacacaaatttacctcttaagggaaagtcctgaatagtaatctcatcaagaaaccccttagaaatcaattcaaaagaattaaactcttgtggaggttttgttttttcttcaaaatacagatgcaatacttcttctgtgttagtggtagaaactacttcaaagtattctattaaaaaatcaggaagcataaattttaaaagctctataggtgtcatatctaattcttagattacaaatttctaattttattttgacattcctccccaggttttgctcttgatccaaaatacccgttccaatccattccggatctgattccacacattcccacactattcttttgtcaggagacaattcaaccactttcattcttgtcacatcctcatctccgaaaccaaactcattgacaaaacccacttccgacttaacgactaattcctccgtccagacagctgccaaaccttcctgcgtcgtcaacaccttataaacctccgcgataggcgctttaatataattgatatgctctattttttccattttcacaactagattattgttcacatacccaaagttaacaagttttacatcactacaacacaagccgttatctcaaaattccaagaaccttaattcaccacttcaccaaagaacacatccctttacaacatcaatagaccgcaaacccacacaaacacaacaaaaaaaaaaccccgctatgagaagtattcatttgcaacgctgtgcgaatatccctgacttcgcacccgcaaagtgattaagttttcttgtagaagatgtaatttggaaatgaccattaatacatagagaattaagaaaagtcaggagacttatacaggcttaaagtttattagaactaaaggttaaaaacgcaaagtcaggagactttgcgtagctggaggtgattcagatccaaaaatcaaggaatatttaaaaaatcatattaaaaatgatcataaaattcttgaaaataggcagtatgaaattgtagaaaatattgagataaacgaattactaacaagaatgaaaagtgagtaaagcaaagaaaacaccctttttaaaagataacctagaaaacgagcaacaaaagagctgtcgtattcgagcagctcttcattgttgtttgacttaatttttaactattccgattggctttacattatccacgctcttagtatattctcagggttatcattattgtaatcaataatccttctatcatacaaaccttgatcctctttgtatcctttcttttctaaatcagcgatggagttgttgactccaaaataatagacagtatattgaggttttaccttatttaatacaatgatattatttctaatatgtaattctctttcttcgctcaaattagctaatttttgaaacagtttatttgtaaaatcttctaataatattgatatcatgtgtctgttaaattaaattattgatatatcttaatgtctcttttaagggatttcttgtaattatataatctcctagctgtacaatgtatgttttttgtattaatttaaaaaatgagaagtgtaggattttgaaagtttattgaaacatgtttcagtaacagggggcaatattcaaatcaaagatcaaattcaaaatttatgaagcacaaaaaaagccccttcttttcagaaggggctttaagtacccggagccggagtcgaaccggcacggtttcccacaggtgtttgagaccagcgcgtctaccaattccgccatccgggcttagcagacgaaaaaacaatcaagatttgattatttcaacgcaatagaataagtttattatgatgtcataactgtgcttattcctttaacacggtgcaaatgtaaaaaataaaattaaaaattctaataaaaatacttaattttttcctttcagtgtccaataaattttctaaatttgcacctcgttaaaacgaagcacacacaactaactacaaaacaacaaattaaatgtcgcacctagaaccagaagctaaaatttttgcttgttcacaaagtgtctatcttgcagaaaaaattgcagaacagtacggaattccgttaggaaaagtaacgatgtcgaagtatagtgatggagaattccaaccatcgtacgaagaatcaataagaggattacgtgtttttatcgtgtgttcaactttcccatctgctgataatttgatggaattgttactcatgattgatgcagcgaaacgtgcatcagcaagacacattacagctgtcatgccatattttggttgggcaagacaagacagaaaagataaaccaagagttccgattggagcaaaattagtagctaatttattagatgctgccggagcgacaagagtaatgacaatggatttgcacgcagatcaaattcagggttttttcgaaaaaccggtagatcatttatttgcatctacaatctttttaccatacgtagaaagtttaaagttagacaatctaaccattgcatctccggatatgggaggttcaaaaagagcatatgcttactctaagtttctagaatcagatgtagtaatctgttacaaacaaagaaaagcagccaacgttatcgacactatggaactaattggtgaagtaaaaggccgtaacgtaatattagtagacgacatgatcgatacgggtggaacattagctaaagccgcagatttaatgatcgaaaaaggagcattaagcgttagagccatttgtacacacgccattttatcaggtgaggcctatgaaaaaattgaaaactctaaattaagcgaattaatcgttaccgattctattcctttaaaaagagaatcaaagaaaataagagtcgtgagttgtgcacctctttttgccgaagttatgcacatggtgcaccacaacaattccatcagtggaaaatttataatgtaaattttggccgtaagctttaagcaataagccgtaagcactccaatagttactttataaaaagcttaaagcatacagcttaaagcctatagcaaatgaagaatatttattaataactatattttttttacaatgaaatcgattacaattaaaggatcagaaagagaaagcgtgggcaaagtgtcaactaaagccttacgtaatgctggagcggttccttgcgtgttatacggaggaaatcaggcagtacacttctcagcagacgctgcagcgttcaaaaacttggtttacactccaaacgcacacacagttgtgattgagcttggaaaaggaaaatcatttacagcagttttacaagacattcaggttcaccctgtttctgacaaaattttacacattgacttcttccaattatttgatgataaagaaatcacaatggaagttcctgtgaaaatcgttggtacatctaaaggtgttcttgcaggtggtgttttacgtttgaaccaacgtaaattaaaagttaaagctttaccagcaaatcttcctgattttgttgaagctgacattactccacttgaaatgggtaacaagttatacgttactaaagttggaaaaccagagtacaaagttatgcacccagacaacacagtagtttgtcaggtaagaatctctcgtgctgctatgaaagctgctcaagaggctgcaaaagctgcaaaagctcctgcaaaaggaaagaaaaaataatttttttcaattcaaaatacaaagcatcaatcgaaaggttggtgctttttttttgaggttctgagatactaaggcactgagattctaaggttttttttactacagaacggcttcgactccgctcagccggacaaacttaatatttgtcgaacgtgtcgggctgagcggagtcgaagccctctaaagctaattatctatttttttttagaagcagaacatcccgttttcataaaacgcgacattcctgccatccgctatatctttttatccgcaaaaaaagcggctaaaaaggatgccgcttctgtcagggctagccagaagtttcgtttttttattagacaagaggcacaaaggttcagaggcacaaagttgcaatggtttttaaacaatcttatccgtataataaaaaataatccgtgtaaatccatccaaattcaagtcatcagcgtgccattctttgccgttaaaagcaaattatctaattaacaaattggcacattcttcaattaaccctatttttgtaccatgataaaatggatgacaaaactgttttcatcaacacaaaaagaagagaacgctgattatatgaaaaaatatttaatcgttggattaggcaatattggtgccgaatacgcaaatacacgacacaacataggttttaaagtacttgattttttagctaagaaagaaggtctttcattcgaaaccgtaaaaatgggtgctttggccgaatataaatttaaaggaagaactttttttctgctcaaaccaaacacctatatgaacctgagcggtaaagccgtaaagcactggatggacaaagaaaacattccattagagaatatcctggtaattacagacgatctaaacctctcttttggaactatccgtatcaaaccaaaaggcagcgacggaggacacaacggacttaaaaacatcaatttagttttaaatactcaacaatacacccgctttagatttgggatcagcgatcaattcaaaaaaggacaacaggtagactacgttttaggagattgggacgaagaagaaaaagcaaaattgcccgaacgtttagaagtcgcttcagagattattaaatcttttggtaccgccggcttagaaaacacgatgacgactttcaacggaaaataaagaattccaatacgttagcattccgaaaaaccaattatcaattaattaaatggaataataacgaaatagtatttccaattccaaagttaaatgtctaaatttggaataaataattataaatcataaaatcataatatcatggcttttgaattacctcaattaccttatgcatatgatgcattagaaccacatattgatgcccgtacaatggaaattcaccattcaaaacatcataatgcttacaccacaaatcttaatgcagcaatcgccggaacagatttagaaggtaaaactatcgaaaacatcttaatcaatctagataaatcaaatgcagcagttcgtaacaatggtggaggtttttacaaccacaatttattctggactgtaatgtccccaaatggcggtggattaccaacaggtgatttacttgctgctatcgaagcttcttttggaacttttgaagaatttaaagcaaaatttgctaaagccggtgctacacaatttggttcaggatgggcttggttatgcgtacaaaaaggtggaaaattagacgtttgcggaactccaaaccaagacaatccattaatgccggaagtaggctgtaatgggactccaatcttaggaatggatgtttgggagcacgcttactacctaaactaccaaaacagaagacctgattatattgaagctttcttcaacgtaatcaactggacggaagttgcaagaagatttgctttagagaaataagaaaatagagtaaagattatagaaaaaagacgagtgccaaatggtactcgtctttttttatcgtttaattttccgttgaacacttcaatttacataatactggatatgaccaacatgtagatcagcagcgccataaaaaacaataccaagttaatattacgcaattcttcctctttcttcatttgcaaagctatggtttcagcaaacatataagcaaaccatactatcggagcaaatatactaagcaacagaaattcaaactcacttctattactcaaatcaggaagtgacaatagcaagagtggccctcccgcaataacgaccaaaattacaatccggacaagtaaatgtctgattctactttttgcttttagaattataccccttgaatttgcattatctgtctcaaaagactcattaagttcctgattcattttttttcgagttaaccttgttcttcctttattattcacacaagaagcattagacttctaattgagtcctaatataccctaagaaacagcaataaaaaaattataaaaaatgaaatatgtgaaaaccaatctgttttattgtttgacttaattctgagtcagattaatatttagaatccaactttcttgtcgttaaaagccaattcttcttataaagaagaaaatagaacaaagattatagacaaaaaagacgactaccaaatggcactcgtcttttttgtcgttatatttcgtctttagtctattctctttgttctattctctattctcttaaaaaaagaaaataaaaaaggcggaatcacttccaccttttttgccccaaatctaccataaacttaacctactaatgttatggttctgtaaaggtatggcagctattcgaatgaaaaaaactttctagacgaatggcaaatatatccgataaagtgaatgtaatgtcttactttagaaatacttgagtttattccaataaaaaaggtggaattacttccaccctttttgccccaaatctaccataaacttaacctactaatgttatggtatttcaaaagtattgtagctttccaatttcaccaaacaaataagacgaacggcaaaaaaaatcgatgaactacacaatttaaccttttgttagtattttattaatacgctctcgcgtcttttccttcgtaaaaattcatgaaagctctattaaccacacggttcccaccaggggtcggataatctcccgtaaagtaccaatctcctaagtttttcggacaagcaatatgcaaatcttctactttttggaaaataatttttacttcagcattaatttcaggagagcttaacatttcagctattttatctgaaatttcttcaggagtaaactgatcgtaaattgccgtaacgtagtttacaacatccgtatctacataattctcctgcgctttacatttcgcataaacctcgtcaacaatatgatataaatttctttctttcaacaaagccaaagccgctctaaaagccacaagaccttccagtttcgccatatcgattccgtaacagtcaggataacgaatttgtggtgccgatgaaacgattacgatacgtttaggctttaaacgatccatcatctttatgatactcatctttaaagtagtaccacgaacaatactatcatcaataataaccagattgtccgttggcttaatcactccgtaagtaacatcatacacgtgagcaactaaatcatcacgactactgtcttctgtaataaaggttcttagtttagcatctttgatcgccactttctctgtacgaatctttacagccaataattcctgtaaagtctcagcattaagcgtattcctgttggctaaaatataattgttttttctttgatttaaaaaatcctgagccgcttcaactaaaccataaaaggaggtttcagctgtatttggaatataagaaaacaccgtattatcggtatcactgtcaattgattccaaaacagcaggtaaaattaattttcctaaatttttacgttcctgataaatttcagcgtcacttcctcttgagaaatagattctttcgaatgaacatgcttttttaacggttggttctaaaatttgattcatagaaacttttccgtttttcttaatgatcaaagcatttcccggttcgatttcctgcacactttcaaaaggcacattaaatacggtttgaataaccggtctttcagaagccacaactaccacttcatcgtcctgatagtaatatgccggacgaattcctgcaggatctctaaaaacaaaagcatcaccatgacctaataatccggccattgcatatcctccgtctaagtttttagcagaacgggctaaaattttcgcaatatccaatcggtctgcaattaccggagaagcctctctcttagaatatccttcgagtttgcaatcctgataaagctgcatcacttctttgtctaaaaagtgtccgattttctccattacagtaaccgtgtcagccatttctttcggatgctgacccagttctactaaattttcgaaaagctctttaacattagtcatgttaaagttccctgccaaaattaaattacggtgcatccagttgctttgacgcaggaatggatgtacactttcaatactattctttccgaaagttccgtagcgaacatgccccagaaacaactctcctatataaggtatgtttgctttttgtttggcaacatcgtctgcatattccggatgagaactcatctcttcattaatacgctcgttgatttgcttgaaaacatcctgaatgggctgtgaatgattggaacgaactctgctgatataacgttcaccgggagccacatctaatttaatgcttgcaaaaccagctccgtcttgcccacggttgtgctgcttttccatcatcaggtacattttttgtatcccgtaaaaagcggttccgtatttttctttgtaatattcaagcggtttaagaagtctaaccaaagctataccacattcgtgttttaaagcgtcgctcattgtgttgtgtattttgtgttgttgtaagttgtgtgtataaacgtaataaaaaagccccgttattattcgaggcttttgggcattatatttctatgtcaaactgagttaacgacttaaactgttgtaatcgaatcgctacttcagctttgcttaagctctccatcctttctgttccaaatttctctacacagaatgaagctaaattcgaaccgtagatgatcgcattcttcatattgccaaatgaaatgttttcactttgcgcaatgaatcctgagaaaccacctgcgaaagtgtctcctgctcctgttggatcaaaaacatcttctaatggtaatgccggagcaaagaatacttctctgttgtggaataaaagtgcaccgtgctctccttttttgattaccacatattttggtcccaattcctggattttcgctgcagcttttactaatgaatattctcctgaaagctgtcttgcctcttcatcgttgatcgtgattacgtcaacacgtttgatcacgtctaataattcaggcaaagcacagtccatccagaagttcatagtatctaaaactactaattttggttttttctctaactgatccaaaacactgctttgtactaatgggtgtaagtttcctaacatcaccacatcggcatctttatagttttgaggaacttttggttgaaaatcagccaaaacattaagttctgttactaaagtatctctggaatttagatcgttgtggtacaaaccgctccaaaaaaatgttttaccgccttttacaatttcgatacctgagatatcaatattttttgaagtcaataaatccaaatgttcttgagggaaatcgtctccaactacagaaacaatagccgattgcaggttgaaaaaagatgctgataaaccaatgtaagtcgcagcaccacctaatattttatctgtttttccgaaaggagtttcaatcgcgtcgaaagcaaccgttccaacaatcaataatttattcattttatgaatttcgaattagggtgcaaagatacttcataagttacaatattgcaacggtttaggttctcaaaattttcataaataaacaagagtgtttttcaacacaaaacaattgtaaatgaaatacttacaccataatattttaggaagtcaaaatatgttttacagatttaaaatacaagatttatttttacgaaatacttttgaagcttttactgatttacaacgctaagacctgttttatacctgatattttttatcaaaataatttttcaaaaccccaacctgaatcaaaaccataaaaggaaccactaaaatcgcatataaaacatttttagataaatgtattcctaaaaacagcgtcgaaatcttatccgcatataattttccaatttccagattattgtcggttccgccaaagaatactgcgtaaaccattaaagcaatcaaacctaagccaatcacaaaccagatcgatttagaaatcagaggtttatacactttggcaccactcttttcagctacctgaatctgagccattatttttgaggtaaaatcaattgaaggcgattccaaagtggtttcgctcatcattttatcaataaggttttctatgtttttatcgctctctttcatcacattacactatttcaggttctaattgcttttttaaaattacggctaatttttgccggcttctgtataatttcaccttaacattattggctgtaattcccataacttttccaatttcttctaaactttgatcttcgaaataaaataaagtcaataaaaaattttcttctgccggcagcaaattcaaacagttctgaatcgtttgctttcgttctttatcttctaaagcactcaaagcattgtccattgtcttaattaaatgtgccgaaaattcatctatcgaaatattcagatcttcttttttatttttcttcaaacgatccagacacgtattataagctactttgtaaacccaggtcgaaaatttcgaatctcctttaaatttactcaacgaattataaattttaataaaagtgtcctgcgaaacttcttcagcctcttctctgtttttaaccatctgaagcgccagagtaaagatcatattcttataacgatccactagcacggcaaacgcattggtctcaccctgcagaattttatcgatataatgttgatccggtattgtactcatattatataggacgacagtttattattgcaggttacaagaattttaaaataaatctcaaaaaataaatttccaatctcaaattacaaaatccaagtttcaggtttcaagtttcaagtttcaagtttcaggtttcaagttttaggtttcaagttttaggtttcaagtttcaggtttcaagtttcaagtttcaagttctaaaatctgattattgaatacattagcgctttgtcaaagtttcgatattcaaaattaactcataatcagcatgttttggaatttggaatttaaaaattgaaatttttaaccaaaagttgtaacctaaattttaaagctgtcgtcctatggagtatcaatcaattaaacaataaaaaatatgggaccagaaattttagtaccaataagcctgtttctaatgatcttcgggattatttatcttatttattccaccagaaacagagagcgtttagcacttatcgaaaaaggcgttgacgccagcatctttttaaaaggaagcggaaaaggcgttccaacctggaaggttcttgttttaaacttggcctttctgttaataggaagcggggttgggatttttgttgccttactgattacaacttatacttcgctggaagattcagcagtgtacccgtctattatttttattatggcaggagttggtttgcttgccggattcagcaaagcaaaagacttagacaaagagtaaaaacattaaacagtactttaacaacaaggataacgcgtcggaacaattgtttccgacgcgttattttttatgattttgaacctatggtttcgtagtaaacgtctaccgaaagttttttttgcatcgatgccataacagccaactcatcacaacgctcgttctgtggatgattgttatgccctttaatccatttaaaatcgacctgatgtttacggtaaataatcaggaagcgtttccataaatccgggtttttcttaccgacatagttttttttctcccagccaaagacccatttctttaccacagaatcgataacatatttagaatctgaaactaccagaaccttcatactgggcttttttagcttttcaagccccacaattacagctaaaagctccattcgattattagtagtaaggcgaaacccttcatagaattctttcttatgcggagttccaaccaattccatcaccactccgtaccccccgtttccgggatttccttttgcagcaccatctgtatatatatgtacttcgtgactcatttttttttagacttcttagattttagatttttagattgttagactattggattgttagattgtcggactattggattgtcggactattggattgttagacttccttgatttagcaaaacctaaaaaacattaagcataaaaaaagaaatctaagaagtctaaaaatccagcaatctaagaaatctaagcttctaataatctggaaataatttcaggaaaatacttttgttcgagttcatgaatcttttcagccacagtttccggggtatcttcttcggttaaggccacacttttctgaaaaatgataccaccttcgtcatagttttcatttacaaaatgaatagagattccggtttctttttctttattatccactacagccctgtgtatgtgcattccatacattcctttgcccccgtagttaggcaaaagtgcaggatgaatgtttattatttgatcgggatattgttctattatgttctctggaaatttcaacaagaaacctgcaagaactatcagatccggacctatttcttgtattttttgtaatacatttcgctccaaaagttcgtttttggagaagatttcgactggaatttgatgattttttgctctttctataacttttgccgaagcgttatttgtaaaaaccgaaacgacctttgcaattttcgttctcgcaaaatactttataatgttttcagcattagttcctgatcctgaggcaaaaacaataatttttttcataatccaatttatttttagactgcaaaaaacggaataaaaatcgaaaataaatagtcttaaaaagtctttcttgaaattaattttataaattagtgttacatttataaactaaatagttgttttaaaataaagttttttatttttgccaacaaattaaattctaaaattaaagattatgtcagacattgcatcaagagtaaaagcgattatcgtagacaaattaggtgttgacgaaaacgaagttgtaacagaagcaagcttcactaatgatttaggagctgactcattagacactgttgagcttattatggaattcgaaaaagaatttgatattcaaattccagacgatcaagcagaaaacattgctactgttggtcaagctatttcttatatcgaagaagctaaaaaataataataccacacccgatttctaaaaatccccattttttgaaattccaaactccagttattggtatttgttttttaaaatttgaaatttttaaggatcgggtgttattattttttctcaaaattaaatttcgattgattttcaatcaaaaagatatatttatattgtaatgcccatggctcttaagtaaacagtacagttaagaaagcgtgggttttatttgtttaaagtacaaaatacatatttatggcattaaggcgagttgttgtaacaggattaggtgcacttactcctatcgggaataatatccaggaatattggaatgcacttgtgaatggagttagcggagccgctcctatcacatattatgatacagagaagcataaaacgaaatttgcctgtgaagtaaaaaacttcaatattgaagattttatggatcgtaaagaatctcgtagattagataaattcgctcaatatgcagttgctgccagcgatgaagctattaaagatgccggacttactaatgataatatagacaaaacaagagttggtgttatctggggagcaggaattggaggtttggaaactttccaggaagaagtaatttattatgctaaaggagacggaacaccaaaattcaatccgttttttattcctaaaatgattgccgatatagcacctgcacacatttcgatgcgtaacggatatatgggaccaaattataccactgtttctgcatgtgcctcttctgcaaatgctttaattgatgctttcaactacattcgtttaggaatgtgtgatgttattgtatcaggtggttcagaagctgccattaccattgctggtatgggaggttttaactcgatgcacgctttatcgacaagaaacgagagccccgaaacagcttcaagaccttttgacggaaccagagatggttttgtattaggagaaggagccggagcattagttcttgaagattacgaacatgcaaaagctagaggagcaaaaatttactgtgaaattggcggtggcggtatgtcatctgatgcttaccacttaacagcaccacatccggaaggaattggggttattgcagtaatgaaaaatactttaagagatgccggaatgaatcctgaagatgtggatcacatcaacactcacggaacttctactcctcttggagacgtagcggaattaaaagcaattagtgctgtttttggagatcatgcaaaaacaatcaatattaactctacaaaatcaatgacaggtcacttactgggtgctgccggagctattgaagcgattgcttctattctggctatgcaacacggaattgtacctccaacgattaatcatactgtagtggatgaaaacattgatccttcattgaatcttaccttaaacaaacctcaaaaaagagaggtaaatgttgctatgagtaacacttttggttttggtggacacaatgcttgcgtattgtttaaaaaattagtggactaatttctgcatatgaatattatcaaaaaaatattttctaaatcccgttctcaagaagacgggattttttttgacactattcagaaaatacttggatttcagcctgtttctatcgatttttataagaaagcatttacacatcgctcttccaataaattagacgaatcaggacatccgattaattacgaacgtttggagtttttaggagacgcaatgttaagtgccgttatcgcagcacatttgtttaataaagcccccaaaggcgacgaaggttaccttaccaaaatgcgctcgaaaattgtgagccgcgaacatttgaatgaattgggcaaagacctcaatctcgttcgatttgtagaaagcaaagttcctattcagcattttggcgaaaatattcatggtaatatttttgaatcccttattggagctatttatctggataaaggatattcgttttgcgaaaaatttattcaaaaaagagtgatcactccttatgtcgatatagcacgacttgaaggaaaagtaattagctataaaagtttggttatcgaatggtgtcagaaagaaaaaagaatctttcattacgacatttttgaagataacggcattgatggccaacgtttgtttggcgtaaaattaagcatagacgataaagtcattgcaagagcaagagcaacctcaaaaaagaaagcagaagaaaaagcctcacaaagggcatattttgcatttcaggaaaaaatagacaagaaatagctacaaaacacttgtaactatcttaaagctataacgttttcgtttataatttaacaaaaacatacacttcttaactattgatgctccgttagaaatagtatatttacactttatttttcatgacatggctattcatagattggatttagacgaatttgacgaaattgattattatttaatggcaattcacacttcattagaagattacagattggcctattttatcaataaaaaccttccgataaacttaagtaagagcaaaaacgagatccatgctcagactaaagaaggcgaggcaaatttttcgagattttattattatgactccgaaaaagcagtttcatggaatctgattcagaataaaaatgagatcatttcagtgagtaaaaatgattctcaagatttgttttccaatgaaacaagtgaggtttcaacaacaattcatttacttcctgaattcaaaaaagtagattttttcctgaaaattgacaatagcgaagaagctattgacttttcagaaattcaacaacaattaaacaaaatagaaagtattgcagcaatttatgctgtagatactgacaagataaaatcaaaaaacaatctaattttttaaaaaaaatgctaaaaacaaacaaaaaaaccaaaattgttgctacacttgggcctgcatgtagtacgagggagattatcaaggatatgatcgaagcaggggttaatgtgtttagaatcaatttttcgcatgctgattacgaaggagtaaaagataaaattaatattattagaggtcttaatgaagagtttggttacactactgcaatcttaggtgatttacagggtccaaaacttagagttggggtaatggaggaaggaacagtagtaaatgacggtgatgttattacttttacaactgctgaagatatcataggaaacgctcagaaagtgttcatgaaatatcaaaatttcccaaatgatgttaatccgggagaacgtattttattggatgacggtaaattaatcttcgaaattcttaccacagacaaaaaaacagaagttaccgctaaagtaattcagggaggagaattaaaatctaaaaaaggagttaatcttccaaatactaaaatttctttaccggctttaacagaaaaagatattgctgatgcgattttcgcgatcgaacaaaaagtagactggattgcactttcgtttgtaaaaacacctcgtgatttacaagatcttcaagaattaatcgccaaacattcagaacataaaattccgatcgtagctaaaattgaaatgccggaagctcttgagaacatggataaaattgtagcgtattgtgatgccttaatggtagcccgtggagatttaggggttgaacttcctgctcacgaagtaccattggtacaaaaagacctgatccacagagcaaaaacggcaagaattccggttatcgttgcaacacaaatgatggaaacaatgattaccagtttaacacctacaagagctgaagtaaacgacgttgctaactcggtaatggatggagctgatgccgtaatgttgtcaggtgaaacggctacaggaaactatccggtacaggttatccaaaaaatgacacaaatttgcgaggcagttgaagactctccgcttattcaggttccgcaaaacacaccacaaattaaaacaaaacgttttgttactaaaacagtttgtcatcaggcagctttattggctaatgaaatcaaagcaaaagcaatttgtactttgacaaatagtggctatactgctttccagatttcagcctggagaccatctgcacatattctagtatttacttcaaacagaagaatcttaacacaattgaatttgttatggggagtaagatcttacttctatgacaaagacgaaagcacagatgatactgtaactgatgttaacgaaatcgcaagagaaaaaggatatgttgtaaaaggagattatttaatcaatcttgcagcaatgccaattaaagaaaaaggaatggtaaacaccatgagagtttctgaaatagaatagtttactttttttaagtttacatagaaagccattcgataatcgaatggctttttttattcccgcattttagtacctattgtatgctcaatatagctcaattgcattttactattttcctattacatcggcattatatcagaaaacattgggctaaaacaggagtaaaattgatataattccctcttttcatcaaaagcaaagacctcgcacattatgctatttaaataaaatcgtttatctttgatagagaagcaattaattgaattataacaacttaccacaaacgccaatatttatttaatacaactttacctatactcaggatttaatcaatattttaataatttctaatttaactaatttaatcattaatttaaataccaaaagatgaatattaaaagaaagaatcttcgtataatcccattgtttttattgggtttactgtacagctgctccccaactgtaagagttaccaccgattacgatcgcagcactaatttcggcgagtataaaacttttgccgtttacgacttaaaagaacaggaaggtcagattagtcaattaaacgttgatcgtgttacaaaagccatccgcagcgaaatgttgagtaaaggttttacagaaactacagctagcccggatctaaaaatcaatgccatatcaatcttaaaaaacaaaactgaggtatcggcaaacactgacttctatggttatggtggcatgtatcgtccatatggatattggggtagaggtgccatgatgggaggtgccaataccttcgtcaacacctatgattatgtcgatggctctctaatcatcgatattgtatcaacgaaaacaaaaaaactgatatggcaaggaataggtaatgctaaaatagacagccaacctaacaatccggaagagtttattgcatcatctgtcaaaaaaatcctggcaggatttcctcccggattaacaaaaaaataggtttgcaactccaaaaagcaagcactaaaatacgcaacagatctgttaccccagtatcgtaaccaaagccgatctaagatgaaattaaaaaaattcccgacttaatcaggtcgggaatttgtattgctgtatgaatacgtgaaattagcaactaaaaattatttaatccagtaaggctttataattttacgctctttatggcacaatgccaataagataatagtcgcaataagacaaaagaatgttgcctgaatactcccttcgggaccaaattctcctccggttatcaatactgagccttgtattttgctcacgattaaactactcgttttttcgtttccagatgtaattgccccgtaaatgcctgattgtgtaaaattccaggcaaaatgtaacgcaatcggaaaccataaactacgactgtaaataaaagcggtgccaaataaaaaacctgccgtagttatgcataagcctgaaagaaagctaccgtgcggatttgcaagatgaaaaacaccaaatagtatggaggaaattgtaagcgaaatataactccccagtttttcctccataattctaaatataataccacgtactaatatttcctcaataatagcaacagtaaacataatagaaaacggaatgaggataaacgaaaccgggttgatacttacaacactataacttccgttgagataaatcaccaaaatagtgagtgattgtaaagtaaaaccgattgcagttccaataaacagatttcttaaaagcccttttactgctaattcttttattgttcttttatcatactttttaaaaaaaaggatataactaaaaatacatgatgccgaaacaaaaagcccttttaaaagatttcgatactctttatcgagtggagttaatgccagtaattttgctgctatttgctgaccaataataacaactgccataaaagtaagtaaggcaagaataattttggttatgggagaattaaacgttttttgttttaaagtaagcgtttccatttttatttggtttaatgatttatgatgtagcaaaagtagcaggcatcaaaaccaaaaaatagaatgaaatttgccttcgttataatttttgaaattgtttgggtaaaaatccggtttgatttttaaaggttctaataaagtgactttggtctgaaaaaccacattgaaaaccaatttcggttagattcgtttgattagattgtataagcgaaagcgaacgatctattttaattcggcgcatatattctcctaaagtacagccaaagtatttaggaaaatgtttcgaaatcgtaatggggtttaaatttaaaatctgtcccagattgtgcagacttggattctcgttccagcaatcatttaataattcgtttaagctttttacccaaaacggacttttttcaaattggtccaaatggttattatctttggataattgagcaaacaacatcgtaatggtatctccggaaaaagcatcagcaatctgagattctttaaaaatcttcaggattaaaaatttagacagtgtcgtattctgaactgatctttcgataatagcttctgttaactgaagttctttcaacagattttcttcaatttcaatattaatgtttttagacggaaacagcgtctcctgattcagatgcagttcatcactatggtaaaacaataacgatcccgggccaacaatagtactggagttttttcgcttttcggccgttcctccttttaaaaaaagagtaatgtgcgcattattgtgcgaatgccagccttcataaactttacttttatattcagtttcaacaacagcaatcccttgcgtattgctaaaaatgtttttggtgtttcccagatatttctctttttcgagctcgtacattttgtaatataaagtgtaattacaagaaccaaaatactacatattttggagaaacaaatcgtcatttggatttgtttctaaaacagtctctcattttgcattgtttgtaggtttttctagcttaaaaaaaacattttgtaaaaattaacgattacaggttagttttattagctaaaatttaattgttttgtaacaaattagaaacacgagagactaatttatcaaaatcttaaacataaattatgaatacattttcattcaaatcagtactggcagcttctgtattttttgttggggcaaccggatgttttgcacaggacattttagtgaattcactaaaactgaatgcaagcgaaaaaagtaaagaaaactttaaattcactgaagttattaatcttggaactacctcagtaaaagctcagggttcatcaggaacttgctggagttattcgaccaactctttcttagaatcagaaatgattcgtttaggaaaacaaccggttgaattgtctcagattttttcggcaagaaacgtttatgttgaaaaaggaatcaattacgtacgtatgcacggagctgttagcttaggcgacggtggtgcattacacgatgtaattaatatgtacaaaaaatacggaactgtaccaagagaagtttacacaggattaaactacggaaccgacaaaaataaatttggcgaaatggccgctcttatcgaaggagttttggctgctgtagtgaaaaatccaaacggagaattaacgccaaactggcaaaaagcatacgctgctgttatcgactcttatttaggaaaaacaccggataactttacttacaaaggaaaaaactatactccgcaatcttttgctaaagaggtagtaggaattaatcctgatgagtatatcgaaatgtcatctttcacaacttctccgtactaccaaaaaacaactatgatggtaccggacaactggtcatttgatcaggtttacaacgtaaaagtaaacgacatgacagatgttatcgacaatgctttgaaaaaaggatacacggtagcatgggcaactgacgtaagtgagaaaagctttagctggaaaaatggtgtagcttatgtggctactaaaaaattcgacgatatgacggctgaagaaaaagcagacatgttcaacggaccaaaagcggaaccggaaatcacaccggaaatgcgtcaaacagcatttgacaactacactacaacagatgatcacggaatgcacatcattggtttagccaaagatcaaaccggaaaagaatattacatcgttaaaaattcatggggagaaacaaacgactacaaaggtttcttgtttgtaactaagaattttgtaaaatacaaaacaactgccttaatggtaaacaaaggaggaattccttctgatcttgctaagaaattaggggtttaattacctgggaattttaaataataaagaagcgctgcaatgaaaattgtggcgcttttttattttaaccgcaaagaacgcaaaggtttatgcaaggaacgcagaaacatcttatcagtaaccaatatcaaaatgctgtgtccaaattagcattacaaaaatggaacgcagattacgcagattcgctttgcgaaaacgctaataaaaacggatttctcagaagttaaccaataataaaaaaaatccgtgctgatccgtgttttcgtgaaacgaatccgtataatccgtgggctattttttaccgcaaagggcgcaaaggtatacgcaaggaactcagaaacatcttatcagtaaccaatatcaaaatgctgtatccaaattagcattacaaaaatggaacgcggattacgcagattcgtttcacaaaaacgctgacaaaaacggatttctcagaagttaaccaataataaaaaaaacccgtgctaatccgcgttttcgcaaagcgaatccgtataatccgtgggctattttttaccgcaaagggcgcaaaggtatacgcaaggaactcagaaaccttttatcggtaaccaataataaaaatccgcgctgatccgtacaatccgcgggctattttttaaccgcaaagaccgcaaaggtttacgcaaagaacgttaagcgctatttttttgtctaaatcaggtataagtacttggatgagttgtttttagtatccataaattcgtcttgcttaagcaattaagaggcgtctcccgaaaagcctaaacagagtaggacaatcaaatcaactattaaaacatgtcaacatcacaagtaattacagtacctattacagagcaacaacatctgctatttttatttcttccgttaaaaaaaggccttttggcagaggctataaaagctgctcagctaattagagaagctgcagctcctgcaacagctccaaacggagatctccgcaaaacaaccggtgttcattattttacaatttatgcacaagaagacggaaaatctactccgggaattccggttccgggatttcaatcttttccgggaaaagacgtaatggtggtaatgtcaatctacgacggacaatttgatgcttatatcaatgctttttttgaaattgaagccgttgtaaatggcttaaatggtctgttgcatttaatagatgaaacaggaattcctggcgtagacccggacggaccaacctcagcaaaacatatcataaaaaagaaaggagttaaaaaaaatgcagcagcattcttttgtttcctgatgcgttataattttggagatcctgttttttctgccggcgataaaaacggaaaatatacttttggtaccaatttcccgggtcttacagtcgccaagattattgataaatatccaaaagccagcgaaatatggccaccggctccaagtgatgtcacttatagttttccaaaagcccaaaaaccagattgcaaataattcctaatcttattgtgataaaagatgagcaattcaaatcaggcggagatgaatgatgtgcagggattaatactcaaagggtataatttcccgcatatcaggtacattattctaagcataagagacgttaaaggagcaaaaaaattctgtgccggtcttgcttcacaaaatagtaccacaggtttgcatattaccactgctgaaccttgggaaaatatgattaaacctgattattgtctgaatatcgggtttacgtattggggtttggaaaaactcataggaacagtcaattgcgacgaaataaatgatgattcaagtgccgaagtctttgcttcgtttaaaaaaggagctatagctgacgcaaccgaaatgggagacacagacgaaagtgctccggctaactggtggaaaaacggaggctggataccaaagcaaaaaccgaaaccggacggcagtgatcttcatattcaattaacgctttttactttaacgcccaaaaacagagaaaaatattatgccgatttgttgcaaatgattcccaaagcagcatcgggaggagcatcagtaattccggtctactatcaggattcagatcctataacggtcgatggtaattcagattatgtacattttggttatcgggacagtttatctcagccgcgtattgatgatattgtatggaacaaacccaaactaaaaaaattaatgggaataagcagtatcgacgacagaccaaaagttccgctggatcgttttgtaataagttcggatgccgatgattataatgcacatccccttttggtaaacggttcctttgcggcatttagattattgtatcaggatgaagcgaagttcaacaaattcattcattcagaccctaaaacgtcacccgaattaatggccgccaaaatgtgcggacgctggcgcgatggtacgcctcttgtggtctctcctgacaaagaagataaaactctgggagaaccaagttctaaaaatttcaattttacgaacttcaattatttaacaccaagtcccaaccaacatggcgatcaaagcagtgacgaagacgggttaaagtgtccttatgcagcacatatacgaagagcaaacccgcgggacgattttaatgtgaccggaaacagtaacaatgcagaaacccatagaattgtaagacgcgcttcgccttatggtcccgtatacgatcctaatgaaaaagccggcatacaaagaggactcgttggactgtttatcggagctgttctcgattttcaatttcgcttcgttactaaactctggttagaaatgggtggtttcagaaaccccgatgattctccaaattacagcggtgttgatcctctatttggtccgcaggtttcagataccaatccctatgattccatttttgctttcaataaaaatggtacctataacgaagttcctggtctgacccgtttcattcgtactgatggaagtttgtatttgtttttaccgggaattactggtttaaaatatattgcagaaggaaaaattccgccgtcatcataaattgagaattccttttgatatagttaagaactaaagagtttattctttttatgaaatagataaagcgctgcaaatttgtatagcgctttttctattaatacgcaggttatttttcaatagttttagctataaaatcatttagataaagtgtatatttgagaagaaaattgttttaacacatagaaacatagtctttgtaaacttaaagaaagtatttcactagttcaaattcacctagtaagttatgcgaaagaaagacttttcttcattacctatctttcttgagtattagtatctatgcttctatgtgttggcattcaattttgttcgatttcactccatattactaaaatataaaaaacatttagcttctaaaaatcaaacccaaatgaaaaacaaactatcaacagcacaaagtgaagaattattgaaagtactacaaatccgttttgagaacaatatgaagagacacgcaggtctcgagtggaaaaatgttcagcaaaaactggaggcaaatccggggaaactctggtcactcgatgagatggaacgaaccgaaggcgagccggatgttgttggatttgatgagaatacgggagaatttattttcttcgattgttctgctgaaagtccaaaaggccgaagaagtctgtgttttgatcatgaggcactggaaaaaagaaaagaacacaaacctgccggaagtgctgtaaatatggccgaagagatgggaattgaacttttagatgaagtacagtacaaagaacttcaaaaactgggtaagtttgatgccaaaacttcaagctggattgttacaccttctgaaattcgcaaactgggtggtgcgttgttctctgattttcgctacaatactgtatttgtgtatcataatggcgccgaatcttattatgcagccagaggttttagaggatctttgagagtttaatgaattttaataacaatagcatatgaaccctaaagttgatctttactttgaaaatgctgaaaaatggcaaaaagaactggaagagttacgaaaaattgcgctggattgtcaattgacagaagaactaaaatgggaaacagcctgctatacactgcatggtaataatgttgttttaatacactcttttaaggagtattgtgcttttctgttttttaaaggagccttaatgaaggatacggatggaattctaatccagcaaagtgagaatgtccaggccgcaagacaaattcgttttacgagtcttgacgaaatcaaagctcaaaaagcaatcttaaaaacgtatatttatcaggccattgaaatagaaaaagccggtttgaaggtaaaattaaagaagactgccgaatttgagatcgcagaagaatttcaacaaaaactagacgaaaacaatgctcttgaaactgcttttaaagctttaactccaggccgtcaacgtgcttacttgctgtatttttcaactccaaaacaatctaaaaccagagcgtccagggtagaaaacatgaccaatcagattcttgagggaaaaggattgaaagactgatcgcttttgaaaaacaactaatgatgttgtcacaaattaataaatatggagaaacaaatgttcttttcagtaaaggctttgattataaaaaacgatacttttttagcggtttataaccttgtaagggggattaaaatatgggatttacccggtggcagaatggaatttggagagaccgccgaagaaaccttgaaaagagaaattaaagaagagttaaatgttgaaatcaggcctgtgaaagtaattgacacctggaattacctgccggctgataattgtcagatcacagggatcatttactacagtgaactcatcacaaatcaaattaaaatatcagaggaacacgacggctacgattggattgcatttgatcaagcaggtactttttttacaaaagattttctgttagaccaaattcaactatgggattggaattcaattaaaaatgatgccgttagatttaataaatccattaagtagtcgctgttatcgttttttatcattttgacaaaggaatgctcgagcgattaaaattttaattggagacgttttttcacgcagatccggcagatttagcagatttttttaatctttttatccctttgttatggactattaatcttaattactcacgttctctgttcgctatcacgagacaaatctcttttactgctttttttcagaatttggacatctccttaaaggggttaaattttgactttaccaaaagaaattagttttatcttagtactaaaaacaaatcttatggaagaccaaaaaaatcaaaccaacccctcctcttctgacccaacaccaaaagtaaccggagtgggaggtattttctttttttcagagaacccaaaggaaaccagagattggtatgctaaaaacttagggcttgaagttaacgattggggatctacttttgaatccagaaaaatagatgctcctgaggtcgtagaatctcttcaatggagcccgtttaaaaaggatgatgcgtatttctctccttccaaaaaagagtttatgattaattatcgcgtacagcatattgaagctcttgtcaaacagctaaaagaaaatggtgtaacggtacttgatgatattgctacctacgattatggaaagtttgttcacattatggatactgaaggcaacaaaattgagctttgggagccggcataggatgtattggtcttcttagtacatagaaaaactatgtttctatgtgtttagttttttttcacgcagatcttgcagattttttattctggaatagttcttagctgtacggaaggaacgtgtttcttttatttgtacttcttagtacatagaaaaactatgtttctatgtgtttagttttttttcacgcagatcttgcagattttttattgtggaatagttcttagctgtacggaaggaatgtgtttcttttatttgtgcttcttagtacatagaaaaactatgtttctatgtgtttagttttttttcacgcagatcttgcagatttagcagcttttttattctaaaaatatttcttagcaattatattcgatcgaaacatccaattgcctcttggctgaaatagcttaaaaactattttggcaaacatggagcgttacaaacatgcaattcagttttatgggaaataccccttgcatagctctttgaaaaaccgaacttctgaaaacttaaagaaacttataacagatgcagctacatcattgtttagaccactacatacagcattaattctaaagataattcttatattcgctgatgggaatgttaatttttaacaacaccaactaacaatcaaaaaaacgccataaccaaaaaaaattatgaaaaaagtaactcgtctgtttacattaatgctctttatttgttacgcttctaccccactctattcgcaaattacatctgaaaaaatagatcttttaatgcaggacgctttggagaaatttaaagtggcaggggcctcaattgctgttgttaaagatggaaaagtaattcaccaaaaaggatatggtgttgcctctatcgaaacaaaaaaagccgtaaatgaaagcacaaattttcaaatagcctctaacagcaaagctttcacaactgcagcactctctattcttgaagacgaaggcaaattgaaatggacagataaagtaaaagaccatcttccaaagtttaaaatgtataacgattatgttacggagaattttaacatccaggatttgctaacacatcgcagcggacttggattgggtgtgggtgatttgatgtttttccctgacggctccaattttacaataaatgatgttctaactagttttcaacattttaaaccggtatctgcttttcgaactaagtttgattatgacaatttactgtatctcgtagcgggagaattaatttctaaagtaagtggtatgacttacgaagattttatacaaacccgaattattgatcctttgcaaatgaacaattcttttgcccaaagcgacaggataaaggataaaagcaatctggctgtatcacattcgtcagaatccggaactataaaacgaattgatggattcggaatacagataaacggtgccgccggaggaatcatttctaacgcagccgatatggcaaaatggatgactttatgcctaaataaaggtcagtatggaagcgacttgaaatcaacactattttctgtgaaaaatcataacgaaatgtggcgcatccataccgttgaagaagtagatcgtgatccgagatataattcacattttagtggttacggtctgggttggggattaactgatgtgaaaggaaatctaaaagtttctcatacaggaggtttaccaggaatgttatccattgttatgatgtacccggatctaaacttaggcatcgtgattttaaccaacacagagaatggcggtggcgggctctttactgccgttaccaatactatctctgacagttatttaggtctggacgattttggctggatcaataaaattgtggaatggatgaaacaaggtagaaatacaggagatgacgttaccaagaatgtttgggaaaaagtaaaattggcaaaaaatgtgaaagtaaaaaacgaagactttactggtgtttatactgacaattggtttggagaaattgaagtctttgaaaaaaacaaacagttatggttcagatcctatcgttcaccaaaattaaatggtcctatggctttttataatgctaatacatttgccataaaatgggaatatcaggctatgaattgtgatgcctttgcgatgttttcactggatgaaaccggtaaagcacaatcaattaaaatgaaaggcatctctcctaatattgatttcagttttgactttcaggatctggatctaaaaagagtgaataaataaacctattttttataacaaaattaaaaaaaagtccgcaaagttttcttttatactttgcggactttttgcttctctatttaatcaagtaatgctttaagctctgattccttctggttaataatgaaaagctgacttttatcgtctaacaatatcttgtaatcaaactctttggctgcattgaacttccagttttttaattctttaaaactgttcttaatgagttttaaattttcggcgttatttttagaaacaatgatcatcttagtcagatttgatttttgcatcttttctagagtgcttatgcttatttcagtctcatcctctgatctggagcggtagcggtatttttgcttgatggtatcaaaatccttttcattttcagaaataacgtatcggtaagccataaggttatccatttcgtttatccagtttgggaattttgtttcatagctttcaatataacgatctataaaacttttgtcaatggctttcttttgagaaatgtactcgttaagcatagggtaaatttcttttgccatgaggttgatgtattttttattgtaccagtcaccactatctgcttttccattcagctgtgcgtatacataaccattggctaaggaagttgccagcgcttcgttaagcagatgataggcataaatactgtattttgatttgttttctttgaaactattatcgatcattttttttacttccaatggctgttcgttgtaaataatatgataggtttcgtgcagcattacactaaagagatccttataatcgtctaaatctgtttgaatggcactgatgaaattattaccaaaagaatttgcggtaaagcctttagaattaggcaaaggataaaatgcgatttcaaaaggaattgaagtgtcccaactcgaattgtaaaaaatcaaactcatttcaaagtaacgctccatgtcattttcttttgcgtatttagtaatttcaacgagctgtttttcaaatttttctttattgggattgtatatgagttcattgtaaattggactaaaagcggaaataattctcgtaagatcattcaacgttttgttggttaaaactccaatagagcgtattttaaaatcttttaaattttctgtttcgattaagttttttctcaaaaaatcaaaggattgcattggttttttagaaccttccgggaattcttcaaatggatagctgtaatccaatgtcagatgatcaaattctgcggccagtttctgaaattccccagtgttgtattttgatttttgaaactcggttttaaaaacgttgtcgggatagttttcggataaattctgaaggaaaacaaaaacagctaattgctcagaatacttaatattaaatactgttttttgagcaaaagaccaattggttatggcacatagcataacgaccaaaagcttaatttttaaagtaattttcattgtttagtaattagaatttattcgataaggattaaaaataattcaaaaattagcaggcaacaaacactcacgatgccctacacaaaacagtaattgctatgttatcttccataactcccccaatctgtttttagtatctttagcttactattttgcactagccctcttttatcttaaatttgcagtcttgttacaaacatagcaaagttttcaaatgctgaagtgtctaaattaggtaaaaaaagtgggaatacatacgatcgaaaatgcagaaggaaactggactatttgtcccgaatgtcagggacgcggtaaaaaaagccaaagactcagcaagaaagtacggcttcagtatcagatagcgctggaaaactttgaaaaatcgaaggactcaggagttcctcctactcgtcctaaagcgcatctgaatgtctgtctccactgtgacggatcgggattgattccttcggaacatcctactattattgaccaagaaaacttcccgcatgtcgctataattggagccggtatcggaggggttgcattggctgtcgcttgtctgcaccgcggaattccttttactctttacgaacgcgatactaactttgatgcccgatcacaaggttatggtctcaccttacaacaagccagtaaagccattgaaggatttggtgttttctctttagaagaaaaggtcatttcaaccagacatttggtacatactccggaaggaaaagtaattggggaatggggtattcgaaaatggattccgtcggataccaaaacagctccgaagcgaacgaatatgcatattgcgcgacaatatttgcgttcagcattactgaaacagcttgggacaaatgatatcgtacaatggggacatcagctcctagattttaaggaatccgaagaccaaagtatttccttaaactttgaagtaaatggcaaaatcaaaagtgctaaagctgacctcatcgttggagctgatggcattcgcagtacggtacgaaaactattaattggtgacgatgttactcctttgcgttatctgggatgtattgtgatattaggcatttgtccgttaaaggctcttaatggacttgctcataatttgctcgactcggcaactgtgtttcaaacggctaacggcaatgagcgaatttatatgatgccttatacagaagattctgtaatgtggcagctgagttttccaatgtccgaagaagaggctaaaatattgagcgcgcaaggaccaaaagcgttaaaaaaagaggcttgtcgaagaacacaatggcatgcccctattccacaaattttatcggcaactttagaggcgcaaatttcaggttatccggtatacgaccgtgaattacttcgtcctgaattattagccaaaaacaaactggctacattgattggggacgctgcacatccgatgagccctttcaaaggacaaggcgctaatcaggcactgttagatgcgctttctttggctcgcgcaatcgtaagagaatgcagaccgctatccaactggagagaggcaggaataagagaaagtgtactgactgagtttgaatccgagatgcttgtgcgaagtgctgccaaagtaaaagactctgctgatgctgctgaattcctgcattctgaagttgtacttcacgaaggcgatgaaccaagaggcagatgtttaaagaataaataagccaatcgtttatggcgtttttgtacatctttttttctcgcagattttgcagatcaagccgatttttctttacaatccatatgttttaaactaaaaaaaggagccacttttcaatgactccttttcgatattaaattttagtattattgaattctttttacagacagcttgtctaaacagaagtaagctgcagtattcattccgtacaccgggtgtgaatctgttgaagccatttggaaaacaaggtattttacgtctcccagaccttgaagtgctgtagcacttacatttatccatcctgttggcattattaaagaacctcctgtgtaatcagccagtgattgtgtaattggtgcagtaatagttccgcttgaatctactccgtaaattaacaattcaaagtgatctccagaagaaaaggcctgagcaaaaccgtctccatacaaacaaccataataaggccatgggtgcatgttgatttttaatccttttacattatacaatcctgtatttccaattttaatccagttagagaaacttgtctcactaaaagtagttccctgtggatttttaggatctgtataacttgaccagtaggcaactatgtacggatctcctgttgtacccggagtacctgccgcaatagtagaagaagttccgaaaccacttcctgccatagtaccccactgattagctacccaaccgttagatccgccagtacctgctcccgaaccgtaattggtgatatcatttacattggatacaataaaaccatcccaatagttgtaacctgatgatgttccgctatgtgaaaatttaaatatgtcaactgttaaattggtatttgcgacataagtgttttgccaatacttccctcctgttgttgatgttccgctggtcaacaaagaacttgtcaggttaagcgtagaagtcgttcctatcgaaggatcggtcactgcgcttttagaagttaagcctgagcttttaaccgctgcactgccgctttcgctatttaatagattttcatcattgctacaggacgaaagtcccagaatcaaacctactgtcaaaaaataaagtacttttttcatgatttataaaaattttggattaatattcttggttgattaataaatagttttattccgcttttcgattattttcctgcggcaaaattcaaatcttctgcctgtttaaaggagttcgtaaccaggtctaatgcgccaatctctgtgaacgtagacacgtatacctttacgaaatcgaccccgggaagatgtactttattaccattaccatctacagcccaactaatgtctattgaaggatctttgattccgccataaccccattcaaaagttccaacattgaatgctgtaccttctccatcgctaatatcttttgtcgccaaattgacttttgttccttttaatgtgtaagaatcaccaagccattgtgggtaataattataacgtctccatttttttgttctggtgataaaacctgaagccgttttattatttgcccatttaagatattccttgtcgaattgccagtcgtactttcctgctacggcagttttacttgggtctggcttgtaatacgtcacctcatagttcttcactgtagtagatttataatactcacttccggctatttcgtaccactcattatcctctgcaatcccatttttattggcatcgtaagccaccataatactcacaggagaaaactttgaagcatttgaaactgtattcatctgaactgtaaaatcgcgtttgccataagcattgatcaccgtgtggtcgaattttgttacgatataaccaccgaaagttcccagatcaacaagagatccgtcagccaaaatagcctgtgcattctctatcgcttccgcttttgttgcaaactcaaaaccgtcattgttataatgcggagcaggtacataatcgataatggaaagcgctttcgaagtatacgttttaccggtttcggcaactgtaactttagtagaagcctgttttaccaacttattcagcgttacggtaaaatctacagcataacttagtgcttttggcgctataaacttcaaggtcttactgtcgccgataacagaatctttagccactccgtcttttccggttacttttaaagtccatttgtattgggcaacagcaccattggcgttttcaatcgttacttccggatcaatcgctacaacgttgtatcgctccgttgtaaaatctgcttgcaattttatagtaagagttggatctttaatcggctccggtttaggttcttcaattacaggctccggctttgcatcatcattactacaattgtaaaaagaacaaacaatggcgaggtacaaactatattttataaactttttcatatttttctcttcttacttttttagattgtattttttaattatttgaagatctgcagctcctgagaatcgtgtagccatagacgactgctggtggcaaagccccattggttcgctgacacagttcactactttgataaagtgaattcccggaagatttgctttatttccattcttgtctaccgcccagtcgatatcaatatcagggcttttggcatttacgtatccccattccggagcctcaaaattccataaggtagtttgccccggacgtacagctgcgaaatttacgtttagcttcgttccttcgtaaacagctgtattttgagtatcccaggctggataatactctttcttagttttagaccttggtaaaaagtaggtttgagattggttgttctcgcaataaagatgctcacgatctaaaaaaggatcatttgggccgcttactactactttcttaccggccgcaggtttatagtaggtaattttaaaattcttaaccgtgttttctttagcatgctgacttcctatgatttcataccattcgtcttcatcgggttttccattcccatttttatcataagcaacataaattaaacccggagccggaggattggctttatccgttaaatctgctccgtaaactctgaagtctttttttcctgaaagattaactaccatgtgatcaaatccaaccacaattgaacctccaaaacctcctaaatcgattggataaccaacgctggtttcgctaattcttcccaatgctaccctcataacatctgctttcacaaatccgtctttgtataaatcattggcaaacattccgggtgccggattaaaatcctgaatacttgttatgtaaggattgtaattttgagtctcatttatcacattcactatggtggcacttgtcccttttttatctccttcagtaacatttaaggttagttcataggcaccgggatataaagccacaaatcgtaaatctttagtagttcctacaatcgaatctttagtttgattcaccggattttttttaagcacccattgataatttgggttactggtttcagctgatgctgtaatattcaaaactttaaaggtgtttacttcaaatttatcttgaagctttactgctattggtatggcgagtccttctccggtgttggcatcatttttatcgtcatcgctgcatccggtaaataccgctgcaaaagccaataataataaatgggcaaagttttttttcataattcctgatataataatttagtttaatacacttttgaatgggttatcgcgtaggaatgctttctcctgaaagatgcaaatctgtcgcccccattatttctgtcgaagtttctccgagccatcccgcctgctgattaaggccattgtacactttcacaaaatcgattccgggaagcattactttgtttcctttttcgtccacagcccagttaatatctattcccgaatcatcatcattgtttggagcattatctgcgtatccgtataaaaaagcatactgcacaaaataacttcccgttccgctttcatcaactgcgttatcgggtagtcttgttcctttataagtgatagaagattggtctttaagccattttggccagtaatctaaagaatgattgtaagcattattctgaaccagataaccacttttcccttgattatctttccaaaaaatatactccatatcaacaaaacctactgtacctgtagttccgcccgacaccggaattttattgggatcaggtcggtaatacgttatttcataattctgaatcgtttttggcatcttatgcccaccgccttctatctcgtaccactgatcgtccggaagtccgtttttattcttatcataagcaaccatgattactcctgcttcactgcttccgccgcgcatggtactgttcggatttggattagcctctgcccagaatgcattacccagaattctaaaatcacgtttgcccttaacattaacaatggtatgatcgaatccaaaaacaacataaccgccaaaagcccccaatgaaaccagatcaccggttttcttagccagataagtattggctcttgataaaattctttcaggagtatctccgtcattagcaataggcagatcgtttacaaactgcccgggtgccggtttaaattcaaatacttttgagatgtagcttttatactccttcgtttcttttgtaacggtaacaactactttttgagtttgtacacttcctttgtcatttacagtaacggccaattcatagactcctgcttctgctgacgcaaataaaagttcctttgctgtagtagtacttagggcataactttctgaagatgcttttgtgatggtccaactgtaagtagcttctgctgttgcgctgatcgttggatttaaagtcgtaattgtaaatctctgcatactaaaagctaaatctgaactaacaggcgtcggattgctattttcatttgatgcattatcatcagaacaattggttaatgagagtactgcaataagcaacaataaggattggcagtttttgaaaataggatggtacatgtggtattgtttaggttggtagtagtaaaagcaggagaaaatgaaggaataaccaaagaagttttaattaaaagccttcaacagagcgcaatgttatccttataagcgtacacaatccggcaccgccaaacgtccctggaattgagatgattttctattagaacaggattaaaataagggaagaaaccgacacataatgcattcaaaaaaccccgactccataccgatttccgtttcagagatgatggtctcaaagagaaaaagcaactatacaacactcccgactgaagcagcatagaagcaaaaacgataacaatcaataagaattctctttttgtatgatacatcactaattgaattaagaaaactccgggatgtataaatcaaaaaagcaataagagagaatcccgtcataaaaaatgacaggttcgtttattgttgttcaactttattccacgaaagtcttaaactatgtgattgtggcaggtctcctgacttgttccatctttaaaacagccttctcatcccgcaaagcgaggcaatggcatgagtaacgtttaaagacttatacagaacttacagtagcgggtctgctcaggatttacacctgattcccttttaaccattttttcttaagaaaaaacagaccaaaatctggcgcaaatatataactatcttttacaatagcgtaattctgaataaaaaattccaaattccaatatatctgtcctaaatactcttagaattttgattttattagttgatcccagagtgtaactttaaaaaatattttttcttttttttattcagattttaccccttaaatcacgtagttatacgctaaaattatcagtacccaagtactaattttataatggtttttgaaactataacaacccttatagattacaatcaaaaattaaattactccaccaaaaaacaaataataacttaaatcttatcattatgaaaaaagagtttcaatcaaacgggtgttctgaaataaagcttgaatcgactatccagaataattttggctttgaacaactttatacagaagtttacctaggtttaaacaatggcaaaaaaactagcaaagctatctttagtacaccagaagacctgactgatggttccatccctttaaccccagcttttcaacatcacgagggaacactttatcttagacattatttaacctatgaggcaatgccgggagggctcgatcaagctaaaacagctgcaaagaaacttcagtttcattatactataacgaacaactgtgatgctaaaactagcaattttaaaggatttggacttggaccaacttttatagagagtggaagtctcgttttttttgtgactttaattgatattgtatgagaacactaaatatacttaccttcctaattagcttttcttctttttcacaatctatccaaaaggttgatttaaaaaaagtagaaatactcaactcaaccgctttggctttactagacaattctgcagctattatatcatcaaatccggatgttaaagaattcaatattaatacagaaagtctggagagtatctccttcgacggtaatttattctcatcgaacatgagaggtctcgagtactatggcttaggaaccaaaacaaaagagatcaaatcttttaccatgcaaaaaatgcaaatgccttcggtttccggagcatatagtaaaaatgattctattgctaaagtagcggtcggaattaaatttaatgttttcacactgtataatgcctcatctgaagacatgagagaaaaatatgcttcaatgcgccaaaaattaaaaaaacttatagcattagctaacgatcaaatggaaagagaaggatataagataggcgaagacgaagacgaagcaaaaaaatataatgctcgcttcgaagaagtattagaggagctaattaaaaacgaatcaggaatcgaagcaaagaatttttcagatatccttaaagctcctttattaacacttgatatagcatcggcttatagtatgctaatgccagcaaaagatttcaacaagtcccaatctggtcgttttggtgcatggtctacccttacttttacattaggcaagggagacgagcatttaaagctatatggattctgcagatacatacaggataatacagactacgattcaaaaagtaaaaagttcaccaaccaaactaatttttttgatattggctcaaaagctcagtttgattggaataaaatctctgtaggttatgaatatattaaacgaaatggagacggtaaaaactacagatctgttggttttgtccagtataaagtatctgataatctttacgtaacaggtggttttggaaagaactttgaatctgctttaaatgatgaaacagtttctctacttggaataagatggggaattaatgctaaagacagtcgtaactgggaatagcgctaattaatatctaaaacaaaaactccaaactccgacaaattttagtcgggatttggagttttttataaaatcttatgggcagattacattatcatattctgaaaagtcaggatgaatagagtttgtttaatttctctaaaccaaaagcaaatgttcctgtacaggtcctaatgcaaaaacaataaacatggacattacggttaaaatcataatgaccataaataataaggttccaaaaatacccgaatcaaccctcagggtacccagcgaaggagctacggcttttttagtacttaaatatccaatgattagaaatgctccaatcatcggaataaaacgaccggcaagcatcgtaactgaagtggttaaattccaaaaaggagtattatcagccagcccttcaaacccgcttccatttcccgccatcgaagacacatactcataaacgatagtggtaaaaccgtgtggccctgtattgctcagccattccacagcttccggaacatacaaataaacatgaaccgctattgccgaaaataataatggaattgccaaagcacaaaggttaaccaaaacagctacctgaacttccttaatcgagatttttctgccaaacaactccggagttcgtcctaccatcagcgaaccaataaaagtggctatgatcaggtaaataaacatattgatccatccggtacccagccctccaaaaaacgcatctacctgcattccaataaacatccctatcgaagacaacggcatataactatcgtgcatacccgttatcgtaccggccgggattatcatattgaccgcactgtaaaaggacgaataatacgttccaaaacgcacctctttaccttccatattggctagtgaagcgtcaattcccattgcgctgagtttgggattaccagacatttcaccatagagtaaaggaatacaagttacaacaaaccccatcaacatcactcccaaaagcattcttgaaaatttcttattgttgaggtatcggcctacgaaaacaataaaagacatcggcaaaagccaaacgataatagtatgaatgatgtaggtgaaaaagttaggattctcaaatggatgcgcacagttggttccaaaaaagccaccgccattagatcctaattctttgattggaagaaacaccgctgccggtcctgttgacactactacttccctgccttcaacagaggtaattttctcaggctcgtcaaatgtcattggtacaccgttaaacaaaaaaaaagttgccgtaatcatacttaacggcaacaatatacgagtagatgattttacaaaatcactataaaaattccctaatccttgtattgattgtgcagcaagtcccctgactactgctacacccgcacataggcttgtggccgcacttaaaaactgcaaaagcataaacacacctacctgtgcaaaataactcgctcctgtctctcctgaataatgctgcaagttggtactggtcaaaaaactaattgtcgaatttaacgccaatgtccactccatactgtcgataccagccgggtttaaaaatagttttccctgcagcaataaaataacaaacccccaaaggaaccatataaactgtacagataacaatacttttaaatatgttttccaattcatttgaaccgtggggtcaattttacaaaaccggtatatcaatcggtctaatggattaatgaagtccgttatgcttttttcatttgcatatatttttttcatttcccggcctacgatgaccgacagcaaaataacagttagaagaataccaagtgaaactattaattgagttaacatatattttaagattgaggttctttgcgaaagcaccaacaactagtccatacgaacaataaaaatgttaatccctgatttacaaccgaaagcaattataagaaacactactaccttatcattttgataagattacactatcattttgatactatttccttcttattcctaaaaaatctcaaggaattaggatgctaaaaatcaaataattaattagaaagtactttttacggcacatcatttgtataaaaaacacaaaaagtaagtccgtttacttttatcaaacttaatttccaaagacatgaaaagacataaaaaaaatgccggttactttaaaatttttaaacaagctactaaagagcgaagacaaaaaaacaaaatcatacttacgatacaagtcatttttataaccattataactattatggtgtatcaaagaattatgacatagaaatgtattgcaaaaaaacgaatcagcttatacaacgctcttctccttcaggcaaataagtccaaaatagtaatcacaccaaactatcactccctgaatgaagcatcacaaaataaaatccggagaatgctgatacgtttttttgcctatcgaatcaattttaaaaatgcactatacacatcatctttaattgaggttcgcaaatagacttcgttttcgtctttggttttatattcaaactgaatcaaagccgcatcggagtaataaaaaaagtaatcatcgcccaagaattcaagatttgaaataggtctcgttgataatttgtattcaaatgcaatttcaccatttgtaatgtccaattgaaaaagcttacttttacgagtgtatccccaaatattatcactttcttcgaccatatactcaacattatcgcctttaaaatcccttttccaaatttcagttcctgtttttgaatctacagcgtatatcgaagaaacttcggggccttgtgcggcgaaatatagcttcttgtctttacaaaatatacgttccttaatattattctgagtttcctccaatttaaactgccacaaaacctctaatttatcaggatttagagcaaaaactacatttttttcatttgctgtaaagatactttctccatccgttaccagctttccgcgcatggcttcctcaaaacttttttgaacaagaagttttcctgtattggcttcaaaactataaacagaagttccgctttgaataaaaactttattattgaataaaagaaccggactttcattattttcagcatccagtttatgattccatagcaaaccgccagttttaatatcaagtgcataaagattcccgttttgagaggttaccaataattttccctcatttataaccggaatctgatttttcaggatgatctgatctgtgctattccccagtcttgatttccaaaaaatagcaccagtctgattatcaatcgcaaaaatttctccgttaataaaaggaacatacactactccatcctgcaatgtgatagcatttgcacacaactccgtaaaggaatctgttgcttttacggtccagttaattttttcagactctagattgaaggaaaaaagagaaccgtcataatcgtaaatcaatatcgactctttatccaatgcaactttcgccaacggttttagcactttatgagtaactttatcgctaatattgcccgcagcttccattttacctggtactgaaaccgtttgtacttgtccaaaaatattggtaacgacacacaccaataaaagagttattagattttttttcatttttagatttggggttaaatgaactgatttctttttatcaaaacgaaattgccttttaagggattcctagcttgataaatgcttaaaattattacggtactaatatagaaacaattttcaccgatagatcaatattcaagaaataacaactaaaaaaacttcttaaggaattaaggctttttttatagtccttacaaacctgcatacaagccatttctcccatggtttaatgaaaatttcaactaaacgacgacgagaaatatttttagtttgtttttcaaatcaaccaaatcattctctctaataattcttacattcgctcagggaaaagtctattcatgcccactaataaacaatttaatgaaacaaacttttacactcttcagaatcctctttttagtactttttattagtggcaacaattacgcacaacacaaagacgacttttcttcaaaaattgacagtctgatacaaaccacaaacccaagaaattttaacggagtggttgttattaaacaaaacggaaaaataaaatatgcaaaagcacatggctattcagatttcaacaagaaaacagaactgaaaatttccgataaattttcaaccatgtcaattgccaaacaaatcacggctacacttatcttacaagaagtagaaaaaggaacaatccatttagaaactcctattcgtaaatatttaccggaattaaaatattcgtgggcagataccatcactgttaatcaattgctcaacaatacttcgggattaagcagtgaagatatagacaaacctcttaaatttactccgggagccgcttttaattattctaatatcggctattacgtagcgggacaagttttggaaaaacaaagtcataaaagttttgaagagctagtaactgctttgtttaaaaagtgcgggatgaccaacagttactaccccaatgagacaaacaatacatttttaacaaaagggcactccataaaaaaagaaggtagtatcaggctgaacgaacaattaaattttgatattcataattattttggcagtcatttaattgtttcggttcctgacttagcaaaatggaatgaatgtctgcactccggtcaactattaaaacccgctacttacaaaatgatgatcgcttattcaatcaccaatacccatccgctttttggtgataaaccaattggctatggttatggattgcgaataaatgataaaaccaatattatggaaatcggacatacaggttttcatcctactgaaggatatacagcggtcaatttatactatccaaaaaccaaaaccagcgttattgttatggaaaatcaagcatttgaaaattttagtattgcttattattttgaacaggaaattaggaaaatcgttagagaaagtaatctgttgaattaaaactcaaatttataaaagccatatgcataaacgaaattcaaaacaaattatcaccgtactttttttgactttaagtctaaacttctcctttgcgcaaaaaaaagagttccgggaaaccaccgttgacagtctaactttcgtaaataaccgaaaagtattaaacagtttaaataccgatagctttcttaaaagaatttttactaaagacaacatacaaatcccttatagatttctaacgccaaaggataataacaatcaccaaaaataccctttagtcattactttccacaactctacccgaattggaaatgataataaaaaccagcttgaaccatttgcaaaaatctggctgagacctgaaatttatactaaataccaatgttatgtgatcgcaccacaattcagcgagcgttcttcaaattatgaaaagaatagtgatggaattccaatttcaaaaccttctacagctgtttttgctttactcgaattaattcaaaatattgaaaaagaatacccaaacatcgataaaaacaagatttacttaattggatattctatggggggatcgactgcgcaaaatctactcaatatagctccaaaccaatttgccgctatggtttccgtagcagcagttcctgatttttctaatctcaaaaaattaagtaagaagaacatctggcttattcatggaaaaaaagacgatgacaatccttatatcggtagtgttgaattgtttgcaaaattatcttcaaacaagaatttgacttttaccactttgaataatttaaatcataacaacattgtgattccgtttttactaaccgaagagattccaaaatggttatttgaaaagcacaagtaaatcgtattttgatggatttagaacttaatatccttgaataaaatgtctgcgcagactgttgataaatcctcttatttgtttttctccatccactcaatgatttttaaggcaacaccatttgaggattgaaaattttgtcctgtaatgatacggccgtcttgttccacataagattcatttctctttgaaaatttaaaatcccctcctctgtcttctatagtcttctgaattaaaaatggaaagtgtttaaaatattcgccatcttgtttttcgaaagaatcgggataaccgcttattttttttccctccactaagaatttaccatttctggttttcaggttaacaataccggctgttccatgacataccgaagaaataatgccattattatcttcatacacctgcatagcgatacgttgaatatctgagctttcaggaacatcatacatggcacttccaccgccgatataatgaacggctttatagtttttataatcaatttctttagggcttacggtatgtttaatggcgtacataaaatcctgatcgtataaatatttcttttgtaaattatcggaggtattgatataagctaaaggaatactaccaccctttggacttacaaaatcaactgtataaccggcatgtatgaaagtatcataagcatttactatctccgcgaaactattgcctgttgcaatagtagaatttccataataatgtgcgttagaaacaataaataaaatcctttttccagatttattacttgttttactgctggccgctttgctaattattttccattcaccctgaattttcttcagcaaaaacatatccataaattcttgttttttttctgcaatgataatttcagcctttgcaatagcaatatcattaaaaaactccagagaaataactctgcccacacggccgttaaattctcctttcttacctttttgaaaccagctaacatattccgaggccggaacgatccataaaggtttgtctttgtgactcaaaaaaagactggcctcagaataaaaagccttactaatactgtcaggctcattataagatgtaccctcgatatagttttgaatgcaattctgaattaaagactgttctgattgtgaaaaagataaattggatactaatgcaaataagattgcaagaaagattctcttcataaacttggatttaatggttttaaaaatattcctcaaaactatactcattgcattctaaaacgttccggatttataataacggactccaattttatacttttaggagtagaaatgattctttttggtaaatagcttcaaaaaagtcaggcataaaaaaactccttaatttcttaaggagttttttaatgggagatgaaggaataaatcaaaacctatatattaagctatttcaattcttttatctttatcgatctgtttaggctaactgcaatgcgaattctatcatttctttaaaagaattttgtctgtcatctgctgatagagcctcctttttaagaatatgatccgataccgttaaaatagccagagccttttttctatatttagcagctatagaatacaacgcagctgtttccatgtcaactgccaaaacgccgtaggttttccaatttaaaaaaggatcgcctaaatggctttcagtatagaaaaaatcagatgtcaatattgaccctgtatgcgcttttatcttattttgctctgcaatttcattggccttttttaacaattcaaaattcgccgtcggagcaaaatcattgccgttaaatttaaatttattcatcccggaatctgtgcacgcactcatggctaaaacaatatccatcatatttacatcatcctggatagaaccacaagaccccactctcaccaacgtctctacaccatactcttctattaattccgtaatatagattgaaatggaaggcatccccatacctgtgccctgtacactaattctcttaccattataaaaaccggtatatcctaacattcctctaacctcattatagcatataacgtctgttaaaaacgtttccgcaatcagctttgctctttttggatcaccaggaagtaaaacgaaatctgctatatcacccttttttgcgttattatgtgcactcatattattattttttagatttataaactatatttctctcctctaatttactcgatttggataccatttcaagcataattctataacggattttaatgacagtcaacgtgatatgaataaaaactaatttggagttgttcttgctttcgcttcataaatccctgacaacaccttaatagaggtcccataaaacaaaaaacctccaaaatcaaagattttgaaggtgtcttaaaaagtggtgggcgatgaggggttcgaacccccgaccccctcggtgtaaacgaggtgctctgaaccagctgagctaatcgccctattttattaggtcgctatcctttcgtgattgcgagtgcaaatatacagctagattttgtatttgcaagcatttttcgaaaaaaaatcaactaatttttacttactatacctacccgcttcatagtcaataccttttataaactattttttattcgttctgttatttcgtcaattgctcctagcccgtcaaaagtcaaaactttaattttagacttcatatattcgattgcaggccgggttaaagtttcaaaaactttaattctcttcaaatggatctcaacatctttgtcatcttttcgattagacgtttcggctcttttttgtgctcttttcaaaagttcgtcttttggaacttctatattgattaccttacctatttccatattcttggatgcaacgagttccatcaaatcattaacctgaggttcagtcctcggataaccatccaaaataatccccttagctgaactgttttcgtctagaattttactaaaaagatctttcataatggaatcaggcactaagtctcctttttcctcatattgagacatgatttttccgatctctgttttattctgtttttccagacgacatcggtctccagttgaaatatgcttgaacttaagttcttcttttaaaatttcacattgagtaccttttcctgaatacggaggccccattattactaatatttccatttatgtggtgtttttatttttccttctggacttcaaaaatttgactgagttattttgtttttatttgcaggaaattacaaatttacaggaaatgcaaattaattactttacagaccttctcgataaagaaccaaactaagtctatattcactttatagcaaaataacacctactattttatttaaacaatataactaatttcagctttaaaaacactattttaaattaatttagtcgcaacttaaaataactttctgtaaatggaattaactattagaaattatactattgctcaaaaatctgaaaaatttgacattcgagtaccatgtgatagttcagttgaactaaagttttcctacgtagatttcgaaactgaagaaaaccctaaaaaaaaactaacagtaaagttcgccctcaatcaatctaacgatgaattaagtgagtttaatttcgtttacttcaagaacactgatcttattttctttagatatacctatcaatggggaattatagatttcaaaacaaaacaactaaaaagaaatatcattgacaagtctttggattttccttttttttacttgcatgataattgtatcctggtaattgatgattcttttgcggaaaccataacttttgatggggaaacaattgataagatcagtaatgaacagcctcatgaaatgaacgaacatgaagattattttgaatttgacattattggaattgagaaaagaaaactaagtaaattccataaaagatagactatcgataaaattcttagtttctctaaagtcgtatatagattttttcttgttcagattatctaatctttttgcttaatccccaacttttgaacctgatccaagtaaatcctatgtagaatttgttcttactttcactaaacaaaacatatactacaaactccataaatctaaatctgttattatatgaattagcaaggatttatcacaaatcatactggcataaacctcgacagcattcaaaaaaagaaatgctggttatacaattttttaaaattttagaaataaactgtagggaacaacatagtgtaaaatactatgcaaatactttagcggtcactacagatcatcttagtaaaactgttaaacaagttaccgaaaaaacggcaaagcgatttattgaagaagctattgttcttgaagcaaaaattttgcttcacgatgatcatttaaccattttatctattgcggaagaattacaatttacagattcttcctcttttagtaatttttttaaaaggcatacttcccagtcaccttcccagtatcgttcacaattaaattttcattaaataacttataatttatgttttgaccgggttaagaatgttctataagtattgatttagagtactctcaattgcaagacgattgcaatatttgctaaataaaagtaaagaaaatgactcaaacctatcttttagaatggatggatttaacggtgacttcaacccttaatcccggtaaaacagaccttacgatgattactccaattcaattagaagcgatcattaaaaaagcgaccgaacaaacatccttaattcagtcgaaatttatagtgcaggtattttcacttacaaaggagaaacagattaaaattttagttggaaattattatttgtcattgttatttcttttagatagaatcgaagaaataaataccaacagtgaccaatataaagaaaatttaaaagaggttgcagctactttaatttcttgtttgaaagagttagtcacttttatagaattaagatttgccaactatttaaacaaaccgtttccagttattgaaaagaagatatatgaatcatcagttgtagattcttcttctaataaagttttatgcaagctttcgacagatcaaatggcactcattctcagagctggagatgagtcaagaattttgaaagcaaaatcaatgagtatggtttttaaaactattgtaccttttctttctacaccttttaaaaaagatctttcttatcagtcggtaagaagtaaatcatataatgcagaagacaaggacaaagaaattgctattgagagtttaaaaaaaattatagaaaagattaagtcatattaatagcctgaccgcttataatattaaacttgaaaagaaaacagttatgattgcgtaacgaatacattgaaataatgtctattaataaacaatcacttaatcaaaatcatcatcaaaaagtataaattatgatactaattgcaatattacttccctggctttcttttctctttcgaggaaaaatatttactgctataatctgccttattttgcaaataacattaattggctggttgcctgctgcaatctgggctgttgtatctttgcaaaatgccagagacgagaggcgaactaataaacttataaaagctatgaaaaagtagctatacgcttttttatcacatttttaaaagaatccatgttagaagaatttttgccttctaatatggatttttattttattcatctattaagacgaggggtacaacagggtacattgaggtacaacaaaaagttgtacttgtagaggcagtattgtagttgttcctttgactcataatataaatcatgtcaaacaatttgatagcgatttacatagtaaagaaatgaatgttgaacaataaatgatgatgctatgtttacaaatatttcatggggctgttacctaactgctttaggggtggtggtgctgatctggtattttataatactactaaagttttattacaaagatctttttaggatcttttcgggagaaaagaaactcaaatttaccacgtttaaaaacgcaactaaaaacagactggaagatactggagatcaaaaatctttgtcttcgtctttttctgaatcattcggcactttggaagatgctgaagaattatcacctagaatacttcaagcactaaaagaaagtaatgaaaagaatttgtcaaaagagcaatttcaaaactatctaagaatggtcctcgatgaatatcctcatgtaaagatttcttcacttcgagaaaatatcaataaactgatggtatctgaatcttcaaaatacccaaatctgcttttgactttaagtgaagctgacagtttatgggaaggaactgttttctaaaattcagcggaggattaattcctgttctctctggcgcggtatggctttatgtgacaaggaaaaagagctgcaacagtgatattcctctgctttttaaataattgtattgaaaactttaaaaatggtggttatgaaaaaatgtggatggaaattaaaggaattagatgaggaaaaagtattgtcttactgcatacttgttttgttgttggtgtatgaaacaaaaatttacgctcaggatggtgtagccggcattaatgaagcaaatcaaaaagtgagaagctattttgatgcaggtactgagttaatgtatgctgtaggcgcaatacttggcttgataggagcagtgaaggtttatcagaaatggaatgcaggtgatcccgataccggaaaagttgcagcggcatggtttggaagttgtgtctttctagtggtagtggctaccgtaatcaaatcattcttcggggtatagtaatcaatatgtttatgagtaatagtgtttatcaaatcaacaaagggatcaatcagagtatagaatttaaggggctaaaagctcagtatatctggtatttgggaggaggtgttgtggcactgttgatacttttcgccatactttatatcattggccttccatcacttttatgtgttgcatttattggatcttccggtggatttctggtatacaaaatatataggatgagtaataaatatggtgaatacggcatgatgaaagcactggctagaaaacagatcccaaaatgtgtcaaggtatacagcagaggaacttttattaagatatagttgtaagccgttaaaagccaaaatggagaaaggatggagaagaggatggaagatgtattgccgatcatggcggttgaacatgactgcattttatcaagagagggagatataacagtagtatttgaagcagaattgcctgagatttttaccttatcggatcaggaatatgaggtatttcatcagtcatggattaaagcattaaaggtgctaccaaagttttgtgtttttcacaagcaggattggtttttagaaaagaaatataaagctgatttcacaagtgatgacagtagttttttgacaagaagcagtgaacgtttttttaatgaaagaccttttctggagcattcctgttatatcatgctaaccaaaaagccgcaaggaaggaagaactcaagttctttattttctagtcttataagaaataaactggtaccggaggaaactctgaatacacagatgttgcaggactttattgactgcaccggacagtttaagagaatactggatgacagcggttttgttaaacttacgcgtttgaaagacaattcactcaagagtgaaaacagaaaaattggccttgttgagcggtactgttttttgtcagaacgtgaagattcatttgtttttagagatattaaatttgaagaaggtcttgcgataggtgataaacattgccagctttttactcttggtgacgcagctgatcttcccgggctatgtggatctagaatcaattttgatcgttattcaactgataaaactaaattcagtatcggatttgcatcaactttagggcagctcttgtcatgtaatcatatttacaaccagtacatttttattgaaaatgcacagaaaaccatccaaaagctagagagtaaaagattaagacttcagtcgttgtcggcttacagcagggagaatatgattgccagagatgcaaccaatgacttcctgaatgaagcggtgtcacaacaaagacttcccgtaaaggctcattttaatgtgctggcttggagcactgacaaagaagaattgaaggatattaaaaacaaggtatcatcagcactcgctcagatggattcagcagccaaacaagaaacggttggagctccacaaatttattgggctggaatgccgggaaatgaagcagattttcctatgaatgatacttttgacacttttacagagcaggcagtatgttttctaaacatggaaacagcttacaagtcttctttaagtccaacgggtatcagacttggagaccggctaactggcagacctgttcatgtggatatcagcgatgaacctgtaaaaatgggaatatgtaccaataggaacaagtttatacttgggccttcgggaagtgggaaatctttttttactaatcatatggtgaggagctattatgaacagggtacacatgttgttcttgtggatgtgggacacagttataaaggactttgtgatatggtcgggggctattattttacttatgatgaaaagaatcccatccgttttaatcctttctacatttctgaaggtgataatcttgatactgagaaaaaggaaagtattaaaacactgcttttagcactctggaaaaaagacgacgaaacctttaaccggagcgagtatgtagcactttcaaatgcgctacaactgtattatgaaaagctggatattaattccagtatttttccctgttttaatagtttttatgagtttttgaaagatgattttgtaacgattttggaaggggataaagtaaaagaaaaagattttgatgtcaacaatttcctctatgtgcttcgtccgtattacaaaggaggtgaatttgattatctgcttaatgctaccgagaatctggaacttttgaaagaacgttttatagtatttgaactggacaatatcaaagatcatcctattttatttcccgttgtgactatcattattatggaagtatttataagtaaaatgcgaaaactaaaaggtgtgcgcaagatgatccttattgaagaagcatggaaggcaattgctagggaaggaatggccgaatatattaagtatttatttaaaacagttaggaagttctttggagaggccattgtggttacacaagaagtggaagatattatttcttctccagtagtaaaacaggcgattatcaataacagtgattgtaagattctgctagatcagagcaaatatcaaaataaatttgatcagattcaggaacttctgggacttactgagaaagaaaaagcacttgtactttcggttaataaagccaatgatcccaataaaaagtataaagaagtatttatttctctgggcggtatgctatcaaaggtttatagaacagaagtttctctggaagaatatctggcttatactactgaggaaagcgaaaagataaaaatgaatgcgtatgctaaaaagtttgatggagacatcaaaaaaggcatagctgcaatggctcaggatatgagaaatggaaattaaatgaaagagaaaaatgaaagcaaaattaattatctgcgtggtctgtcttctgcttatcggaaatcctgcaagaccagttaataataaagcagtactgcctatactagagatcgtcaaagcagttaccaagaaagttattaaagcaattgacctaaaaattcaaaaacttcagaataagacaatctggcttcaaaatgcccagaaaaaagttgaaaacgtactctcaaaattaaagctggatgaaatttcggattggaccaagaaacaaaaagacctatatcaggactattatcaagaattggcaaaagtaaaatctattataatttattatcaaaggataaaagacattacaaagaagcagactagactggttgaggaatacgaacgagcctggaacctgtttaagcgggattctcattttaaggaaaatgaaattcagtatatggaacgcgtttattctgggattctcgaagagagtgtgaagaatatcgaccagatctttttaatcctggcttctttttcaacgcagatgagtgatttaaaaagattggagattataaataatgctgctgatcgaatcgattccaattatgacgatttgatacttttcaatcagcagaatgtaatacttagtgttcaaagagctaaaactgaagcagaagtaagtcaggttaaacaattttacggaattccgtaataaaagaaaatatcatgaaaaaagtaatcgtattgttctttgccgggtttcttttaaatcaaggaattcacgcacaggccaagcagagaaaggaattattgttgcagatcgccgcacttcagatttatatagattatgctaaaaaaggctattcagctgtttcgaaaggtttgaatttcattggtgatgtaaagaagggagaagttaatcttcatggggattattttacatcattattgaagattaatccgagggtaagatactattataaaacagcagagattatttccttgcagtttaagataatgaaaatatataaaagtacttatactaaacttaagactgatgatttatttcagggaaacgagctcgattatattgagcgttcctttataaaactactcgaaagctgcaatcatactttagacgagcttttggtccttactactgattcagaactcgaacttaaagatgaccaaaggatagagcgtattgatgagctgtataaaacaatggttgataattacgaattctgtttgtcttttagcaatgaagcaaagttattgtcattgtcaaaatcttatgaacaaaaagatgcagaatctacacaaagtatttacggattaaaaaattaacgccatgaaaaggatatttattttagtatttatggtctcttttggatttatcccaatcagagtgaatgcacagtcggcagaaatccagcaattgatcttaaacattgaaaaactctcgcagttcaaaaagattctaagcgatatgaaaaagggatatcaactactttcgggaggttacaaaacagttaaaaatatgtccgaaggcaactttaatcttcataaagtattcttagatgcccttatgcaggtaagcccaacggtcaaaaattacaaaagggtaggagatatcgtaaactatcaaatactgttagtaagagaaagcaaaaaaggattaaacaggtttttaaaaagtgaaagtttcagccaacaggagatcaattattttgagaaaatttatggaaaccttttgaaccagagcttaagaaaccttgatgaactcactatggtaattacagccgataagctaagaatgtctgacgatgagaggcttcaggcaattgataatatttatatggagatgcaagataagcttttgtttttgagagattttaataaatcatcaagcatactggtattgcagagagcaaaggaaaagaaagatgtatatgcttccaaagaacttctggatttaaaaaattaaaaagatgaacatgtataaattttttaaaacagctcttttatttattggcgttatgataatgcccattgctgtcagtgcccagggaatcggtgataatatgcagagtatgcacttagttttagatcagctttatgatgagatgatgccattgtgcagtaatcttttagcagtgggacagggtgcagccggttttgggacgatttggtatatagcttcccgagtctggcgccacattgcaaatgcagagcctattgacttttatccgcttttcaggccttttgttatcggattctgtattatgatctttcccttggtattgggacttattaatggggtaatgaaacccaccgttacagccacagcggcgatggtgacaggatcaaataatgctgttgcggttctcttaaaggaaaaagaaaaggctataaaagaaaccgatccatggaaaatgtatgttggtgcaacgggaacgggagatagggacaaatggtacaaatacactcatgatgaagacccttctgatgagagcatgcttgcaggtataggaaacgacataaagtttgccatggaaaaggcatcttataattttagaaattctgtcaaagaatggatgagtgaagtactgagagtattgttcgaggcagccgccctgtgtattgacacacttaggacttttcaattggtagtactctcaatacttggtcctcttgtatttggcatagcggtttttgatggatttcagcatacacttaccgtttggttggcaagatatatcaatatttatttatggttgccggttgcaaatatctttggaagcatcataggtaaaattcaggagcttatgttgaagctggatttatcgcaggtggaatcaacgggagatactttcttcagcaggaccgatatggcatatctcatttttatgattattgggatcatcggatattttactgttccatcagtagctaattacatcgttcatgcgggtggaggcggagccttagggcagaaagttacaggtatacttagcggcactactaattcagttattacaaaaacctcgcaaggcgctggtatggtaatggactcaatgggaaatgttgcaggtcaaatgtcacaaagcatgtcttcatcagctggtaatactccgtatttcaaagagaaaggaaattacatgaaagataagcttaaaggaaattccggttaaacttaaaaaaaagaggagatgtttactaaaatgaaaaatatagatactgcatttcgatatgtgagagcatttacaatgctggtaattacgggatgtattattatatgctgttatacgctttataaaagctttgagtctgtcgccctgatgcaggataaggtttatattcttgccaacgggaaagcactggaagcatacgcatcagaccgaagggataatgtacctgtggaagcaaaggatcatgtaaaaacatttcataaatttttctttacacttgatccggatgataaagtaattaaaaccaatgttacaaaagctctgtatctggctgatgacagtgcaaagcgaatctatgatgatctaaaagagaatggtttctattctggaatcatttcgggaaatataagccagacaatccatattgacagtgtaactatagatatcaaagaatatccgtaccgctttcaatgctatgccaaacaaagcataataagaactaccagtattttagaaagaagtcttattacccagggaagccttcgtaatgtatctagaagcgacaacaatccacatggttttttaatcgagagatggaataccatcgaaaacaaagatttgactgtggaaaatagaaaatagacagttatgaaatcattaattaaaaagcgagagcagccatttatttacagtaagtattacttatctgcacaagataagtgggtgcaaaaaatggaatctttgacgggcaaactttctaaaagagtccttatttatttgctggttttgtttactgttttggagggagggtattttctctataacatttatgcagcgttcttaaagaaaaattctgaaataaataaaaacccggcaagtgtttcaaaaattaaaacaatcaattttaaaaagtaatgtcatggagcaaaaaataatatcactcaaagaatctaaaaggagaaaaatgcttttagttctgcctgttattactcttccgtttataaccttattgttctacatattaggtggtggaagaatggaggcagaaacggttaaaagtgaagtcaaaaagggatttaattttaatcttcccattcctaaatttaaagaagattcatcacttgataaaatgagttactatgaccaggcggcagtagattccatcaaattgctggagcagattaaaaaagatcctaattactcaaatcaaaaaatagtagaaggatcaatagatgatttcacggataaagactcaggaaaaggacgcagtccatttaatacatccttctatcaagatgcaaacgaacagaaagtttatgaaaaacttaaagcgcttcaaaaagtgatcagcaagcctgctgttcctgataattatggtcaggatatgagggagtttgaaaattatggatcatcaaaaggcgaatcagatgctataaaaaacttagagcagatgatgtcacaaatgggcgcttcgcaggaacctgatcctgaactaaaacaactcggaggtatgctggagaacattctggatattcagcatccatcacgtgtacaggaaaagttaaagcaagcttcagagataaaaaaaggaaaagtctttagtgttaatcgtaaaaaagaagtagataatactacttctctacagcaaaatacagaacattcaaatcttttaaaatctaacttgttctattcaattgatgaaaatttagattctgaacaggagcagaattctatcgaagcaataatccatgagacacaaacaattgttaacgggtcaattattaaattaagattgaaaaccgatgtatttcttcaaggcacactaattccaaaaaacacctttttttatggtattgcatctttaaaaggagaaagactggaggttaaaatcaataatatacagtatcgaaattcaattttccctgttgaactctcggtctacgacttggatggaatcgacggaatctatattccaggagcaataaacagggacgtagctaagacttcagcagatcgctctcttcaaactttaggattaaatggagttacagattcctggggcgcacaggctgcagagatgggaattgaagctgcaaaaagcctgatgagcaaaaaaataaaacttataaaagttgtagtaaaggctggatatcaggttttgctctacgatgaaaaacaaaagaatttgaaataattaaatcttgaaaaaatgaaaaataataattggatgaatttggtttgcctgcttttagtggtattgtcaggctatgcacaattaataaatcgagaggttgatttcaatcgggatcagtttaaaaacgtacagatagcttattctaaaacaacaagtatagtgtttccttatgcgataaaaagtattgataagggcagtgaggatattttaatgcaaaaagcaaaaggagtagagaatattttactgctgaaagctgcaaagcagaattttatacagaccaatattactgtagttacagccgataacaggctatatgtctttgttttgaattatgatgaagtatgccctgatttaaacattaaagctgatagtagtgcaattgtaaataatgatattttgttttcgatcgataatgaaaatcaaaagaaaattgaacagtattcaaagcttgctttatttaagaagaaaaaaatcgacggtttaaagagttcaagatttgatattagtcttagagtgagcggcatatttattcatcaggatgttctttacttcagacttgttttgggtaatgcctcaaagataaattacgatatagaccagcttcgtttttttattcgggaccagagaaaatctaagcgtactgcttcgcaggaaatagaaatatttccacttttttcaacttccaactccatagttattccagataaatctgaagtgactttagtctatgctttatcaaagtttactatccctgagaaaaaatacctcacaattcaacttattgaaaacaatggaggcagacaattagaaatagacatcaagaataatgacctaattgatcttgatgttcttaacagcttttaaaagaataataacttaaaaataatttatcatgaatcagaaaaatttagaattcctaaaagaccagttgaaatataccggatttggagaaatgttcgatcaggatctgaaagaaaagatgctaaaaggagagacagagtttaagattataaaagaaggcgtttatggaaaagatgcaatgactgctgaattgaattttaaaaaatctgaccaaagtgatctgtacttttttaattcttatcatgtgaatcttaaaaaagaagaatcaaaagaaggattagaacagactttttatattaataacaacagcagtaatattacccttaaagaagcttataatttaatggaaggtcgttctgtaaataaagatcttaaaactaaggaaggtgaagtgtataattcctggctaaaaattgactttaaggaatccgagagcaatggaagctttaaaataaatcattaccatcaaaattacggatatgatttggaagcaagtttagcaaagcactctataaaagaacttgaaacgccccaatacaaagaagatcttttaaattcactgaaaaaaggtaatcttcagtcagtaacttttgttgttaaaggagttgaaagtaaacaatatattgaggcaaacccgcaatttaaaacggttaatgtttatgacaataatttacaaaggattaatcatcgtgagagcaaagaggagaaacaaaaagaaactcaaggtaaatctgctagtaaggactctagccagacaaaggaatctgtttcagatgaggtagctgaagtagaaaaaaaaagatctcaaagaaaaggtaaagctaaatctttataagtagttagatggaaactttaaaacctttgtcagatttctttttagcaattgagaaagatttccgtataagtacaacacatattgcactttatgccgctttgcttcaatgtagagttgagaaaggttttgtaaatcctatacaggtctataggtatgaaatagctcctttggcaaaaattttatcagcttacacctatcataaatgtattcaggagttgagtaattatggttatgtaaaatatgaacgatcgtttaagaaaacacaagggagtaagatttatttttttgagtgatggattaatatgaaaaaaaggcccttaatgggctttttttctataaaataatataggaaaggaagatgactaggaaagcacagaaaggaaaataatgacactaaaagataaataatatgaaaccatatagatttgaagatttattgaatattattggagagctacttttgaaaatgaatagtattgaaaaacttttgcaagaaaataaagtaaatactgttgctgcggatgatgatttgctaactatttctgaggcagcaaaattattaaagttatcagtagccactatttataccaaagtctgtagaaatgagattcccgccaataaacagggtaagcgcctctatttttatcgtggagaattattaaattggataaaatcaggtcgaattaaaactattgctgaaatacaactggaaactgaagctaaatttaattcaaaaaatatatgtaaataaacaagaaagacattactttggataatgtctttcttgttttacggtgttttattttaaacttatcctcgtagaagcttctctttttttctcgtcaattattttggtatatatctgagttgttttaacgcttttatggccaagcattttagaaacagtaaatatatcagttccagaaaatatctgaagagtagcgtaggtatgcctaaaacaatgaaatgtaatatgttttgtaattccggagtgagccacccagactggtagcaccctatctacatcccatttttttaaaccagcaaatactttttcattttcttttgttctttcaccgagaatctcaaatgcctcattggagataggcatagtctgaagcccttcagttttcttttgcttaaatctgatataatatccatcatcttctataaattgtacctcagaccatgtaagttttactatatctgagtacctgattcctgtcaaggtagaaaatatagaaattttatgaacaatagcgtttgaacaaggtgtactaaataacttcttagcttcgctcaaggttaaaaagtttcgctgggattcctgttctttgattgaatctattccagagttaatgtcggttcttaattttccttctttataagcccttttaagagtagtttttagtttattatgataggaaagagctgtatttcgagataatgttttacctgtatctcttctgcttttggctttcaagagatattccctgtaatcatttattaatagtaccgttacatctttaaagcagatatcctgattttcagtaaatgattcaaagtgtgaaattgcactgtaccagatcgacttgttgtttccctcttttttatctgccagtttcttgaaatactttagaaaagagccttgtgagattctcttgatctccagctgttctttttcaaaatcggaatatatatcatctttgcgaagttcgttctgtctacgaatctggatgagttcagccgtatgcaggttttctatatttgaaattttttgaatctgacttttaggtttctcaaaaagatacaactttaaaaattcacgtcgtgtagacctgtttgtttcggtgttcagtactggggggtaaaaatccaaataaagagaaattctgccgtcagcgagatttttttttcttagtgttacattagtctttttcattgtctgaggcattaaatataatatcaatatctttttttgcgacataattaaactttccaaccgcgtatttagttattccatgtctttgaataagcagatataaagccgctggtgagattcggaatttctgctgaatctgagttatggtataacatttatccagtcctggaaactcctgaacaggccgaagcattgattcctcaaaaggaatagagaaaaaggcatccagatcacatcttcgcagaacggttcgggttccaaacttagcaatatcaagctcgccacgctcaatgagcctgtaaatagtccttctgctaataccgaacaaattaccggccattttaacatcgatgtaatctttggtctttatgacctccaaatttggatttttagccttttctgtctccttgttgctctgatcaattttagattgtctagtccttgatttataagccctggagctacatttgagagagcagtaaagtgtttttgttgtgcgcgctgtaaactcatttttacagcattcgcagattctggtaatctcgatttttgaactcatagaatttgtgactttaagtgtcccactgtgcctatgtgtgtctctgtgtgccataatttggccaaataataaaaaaaatttgtacctcggttttcgaggtacaaatggggtacaaatttaatcaaaacatggctaaacaaccaaaagaaaagataaataaaaaacgagttaaaatattgtttatcaatactttaactcgtttgtttgtttttgttttttgttattttgtttctctattttccgatgcagaaattcgcaaatatattccctaacaattcatcgttggaaacctgaccggtaataagaccaaactggtacagggcttcacgtatgtcaagtgcaatcagatcgcttgaaagattagtttccagaccaaattttactttctgaatttcatccagggctttaagtagagaatcgtaatgccttgtattggttacgatagtttcattattacgtagtgctcctgtgttgacataagaaagcaattgctcttttaattcttccactccaatattttctttagctgaaatttttagaagttttaagtttaaagtttcaagtttttgattgatgttcccgatttcattttcactcaataaatcaaccttgttaaccactactaatataggtttaagtgggtatttgtttttaactttttcaatttctacaatataatcagaacctgaaacctggaacctgaaaccatcaaacaaaaagaccacaagctgagcctgatcgattttttcgaaggtttttttaattccgatgctttctaccacatctttagtctcacggattcctgccgtatcaataaatctgaaaccaattccgccaatcactaactcatcttcgatggtgtcgcgtgtggttcccgcaatgtcagaaacaatggcgcgctcttcatttaataaggcattgagcagagtagatttacccacattgggttctcctacaatagcaaccggaattccgtttttgattacattaccaacggcaaacgaatcaatcagacgttttagaacaaattcgattctattcagtaactcatgaaattgggtacggtcggcaaattctacatcttcttctgcgaaatccagttccagctcaattaaagaggcaaagtttagtagctcttcacgaagtttggctatttcattactgaaaccaccacgcatttgctgcatagcgatttggtgagacgcttcattatcagatgaaatcaaatcagcaactgcttctgcctgcgataaatcaagttttccatttaaaaaagctctaagggtaaattcccccgcatcagccattcgacatccttttcgcaacaataactgaataatttgctgttggatatacgtcgagccatgacatgaaatttcaatcgtattttctcctgtataagagttaggtcctttaaaaacagaaaccaatacttcatcaagtgttttcgaatcgtccacaatatggcctaaatgcaaagtatgggttttctggagtgttaagtctttgttttttatggatttaaaaaccgaattcccaatgacaatagcatcggaacctgaaatacggatgatcgcaatagctccagccccggatggggtagccaatgcaactatagaatcttgatttatcatgctgcaaaggtataaaaaaagccataaagttgcgaactcaaagaagagttgattaggagacttcccgtctttcaaatgtcaattttagtaattttttaaatgttaaaatactgataattatcagtttgatttgtgtttagaatgtttaaatttgagaaacaaacctttaatctcaagtaaaatgaaaaagatactatttcccacagatttttctgaagcggcgacaaatgcttttgtccatgccttagaatttgccaaaattgtaaacgccgaattagttttgttgcacacttttgagattccggtttacgatagtcagttttttcccgaaaattacgcctcgatttacagctcaatcgaactggcaaagtttgaaatgtttaaagatgagattccaaagctcagaactattgccgcggaacgaaaattagatcacattgtaatcaaacatcgtttgatggacggtgatttgatttttaatttgaaaaatgcagtagaagaagatcatatcgattttgtcataatgggaacttcaggtgtttcagactggacaaaatttttcctcggatcaaatacaagttctgtaatttcggaagttaaagtacccgttttgtgtattcccgcagatgcaaaatttaaaaaaataaaaacaattggttttacaacccgctatcgtgaaaaagacaaggctgaacttcgaaaagtactggaaatagctaagaaaacaaatgctaaagtaaaaagtctatacgttagagcttcaaatacagacgtttctgatgctacaattaaagaatgggataaagaatttgctcatgaaaatgtagagtttttggtcttgccaagtgatgaagtaaaagagactattctcgattttgtactgtataaagatgtggacgttctgactgttattacacacaaaaaatctttctttgaaagtattttcgaatccagtttcagtaaaaaaataactaaggaggtttcgataccggttttggttatgcatgaaagctaaaatcaaagactaattagtgctggaatgtgagtgtaaaagctatatttgtgtttcattaatttataagaatggaagcctatcacaataaagttgaatactatacagcactctttaataaaatcaacaaaaaatacaacagcatcagtatactgcgtcttttaagcgtatttctgtgtttgtttttattgttttactacataaaaacgaatgaaatactttacgtagcttttgcttttctatcttttgttggttttctttttttaatgcgtattcattcgcatttatcttttaagagagaacacactaaggcaattctaaaactaaataagaatgaaattgcctatttgaaaagagaaaaaatcccttttgagaacggaatcgaattcaatgatttcagtcatccgtatgcttacgatctggatatttttggagagcattcgttatttcaaaatctaaacagaacggctacttatatcggaaaaaaaacactggcaaatcaattactgaatttgtcttgtaatcaaactattcttgaaaatcaggaagcaatcgaggaattgaaaactaaaatggattggcgtcaggattttttggccttggcaatgattagttatgatacaaagaattcttatgatgctttaatttattggaaatcatttcaaaataataaactacctaaagttttaattgcgctatctgttattcttccagtcttgttttttggcttcttggcagcctattttgttacttcaaaaacaattttattatcgtatctgacctatgtttttattgccaatatgattgttttgggaaattcttttaagcggattcagtcagagattgcgaaggctgataatgtggataaaattattaagcaatatagtttactggttcagaaaattgagacagaaacttttcagtcaaaaagattgattgatttacagcaggagcttatttttaagaatgcaacggcgagtaaacatttaaaagatctttcggaactgttttccaggatggatacgatcaacaattttgtaacggcaatggtttttaacggcatgtttttattcaatttacatgttttaaaagcgcttttgaaatggaaagaaaactattctgaaaaattggagcaatggattaatattgttggcgagtttgaagcactgaacagtttagctaacttatcgtataataatcctgattttgtgtttcctgaaatcaattccgactataaaattggattttcaaatttgagtcatcctttgttaaattcggtaacaagggtagggaatgacactcacttttatcctgaatctttcatgattttaacaggttctaatatgtcgggtaaaagcacatttttaagaagtttaggaatcaatatggtgctcggaggaattggctcagtagtttgtgcttcaaatgctaacatacatccacttcctgttttggtttcaatgcgactgtccgattcgttagctgatagtgaatcgtacttttttgctgaaattaaacgtttgaagcaaattatggacgctctggaagaacgccctgcttttgttttattagatgaaattttgagagggacaaactccgatgataaacgaaacggaacaatcgaagtcgttaaaaaggtaatcgctaagaatgcaattggtgcgattgctacacacgatatcgaggtgtgtctgacaacaaatgaatatcctcaggttttaaccaatcagtgttttgaagtagaaattaaagacaatgaactccattttgattacaagctgcgcaatggaatttgtaaaaataagagtgcaactttcctaatgaagaaaatgggagtaatatgatagattattagattattcgatttctggatctttagattacatacagagtttatacttttactcaaaatccaataatccagcaatccaataatctaataatctaataatctataatttatttctgtacttctttgattgtatttacaaaagcttcaactggctgagctcccgagatcgcatattttcgatcaaaaacaaaaaacggaactccttgtatgcccatattctgcgcctgaataagatcagtgtgtacatcactgatataaagtttttcattttcaactgcttctttgacttcatccgcatttaaacctgctttcacaccaagttcaatcaaagtttcgggatcatttaagtctcttccttctgtaaaataagctctaaagaaaatttcctccatttcatcggcaagatttttggtcttagccaactgaataatgcgatgtgccgacaatgaatttgaaactatcgctttatcaaaatgatagtctaaaccaacgcttttagcgtgttctacgacacctttgtgcatttcgatggattgttcaacagagattccttttcgttcagcaagaaaggtgtaaacgtctttatctgtttgtgcttcaatagtaggatcaagctggaaacttttccattcaatttcaaactcgtcattaggaaattcagctaaagctgtttccaattgtctttttccgatataacaaaacggacacatgatgtccgaccaaatttctattttcattttgtaaagttaaaaaaatgtttcagatttcaggctttggtttattacgaatttaaccgcaaagttcgctaaaggattacgccaagctcacgaagctttgcgctctttgtatttgtgagtataaattaaatcaaaaaaaaactttgcgttctttgcggtaaaatcagctcaaaccataattatatttcaacttgtaacctgaaacctgaaacgaaaaatctcaaaaataaaaaaccgcaactctttttgggaattgcggtttctaggtataaaaaatggttggttaatagcgatgttgtattttttttacaatgatatgtctttaatttgaaactaaaaaagatctctgtaacaaaaagaagttttgatgttaactatttaacattactggcattactaacatcgtaaccgtttctccttcttctaaaccgtctaccggagttaggatacctgctctgttaggtaatgacatttctaacataatcatatcggattgtaagttagtcagcatttcagttaaaaaacgtgagttgaaaccaatttgaagatcatctccctgataatcacaagttagtctttcctctgctttgttagagtaatcgatgtcttctgcagaaacgtttaattcagctccggcaatttttaatcgaatttgatgtgtcgttttgttagagaaaatggccacacgtttcaccgagcttaaaaacaaagaacggtcaatcattaatttgtttggattttcttttggaattaccgcttcatagttagggtattttccgtcaatcaaacgacaggttaaaatataattgtcaaatgagaaagtcgcatttgaatcgttgtattcaatttttacttcagcatcagaagttcctaagatactttttaaaatattcaaaggttttttaggcatgataaaatcggctacctgagatgcttttacatctgtacgggcatattttactaacttatgagcatctgttgctacgaaagttaatccttctggtgagaattggaagaaaactccagacattaccggacgtaaatcatcatttccggctgcgaaaatagttttacttacagcagttgccaaaacatcagcaggaactagcgttacagatggctcttcaagacttaccgattttggaaattcttctcctgcagcgtatgctaaagcatattttcctgagtttgaactaatttcaacggtattgttttcttcaacagtaaaagtcaaaggctgctccgggaacgtttttaaaatttcaagcaaaagtttagccggtacagcaacacttcctttacttgtagaatcgattgacaacgtagcagacatggtagtttcaagatctgaagccgaaacggtcagttcgctgttgtttagttcaaataaaaagttgtctaaaatgggcaacgtattgttactgttaattacactacctaaaacttgtaattgttttaataagtacgaactcgatactataaatttcatctctattgttttatttttttgctcttttctttagtcttttctcaactaagataggttttacaaatatatcgtaaacaatcttaatttgtgcattttttttattaacatctagttactgtattttctttttcggatgtaggtaaatgccagtccgaaaatcaataaaattagaattggaagtccgatagttatgaattgcgtgagcgtataattttcataaactttctctttgtctaataatggcagactgacatctttacttctaatgttaataagtcctgtatcatccagtaaataattaatacagttcatcataaaatctttgttgtcatacagatttccggtacgctgatcgtagcctaattcaaccggcatcatatttttgtcgagttgatttctggccagatcaccatcggctattacgatcattttgtttggttttccttttgctaaaaacgagtcttctttgaaaggtaaaacacgattttcaaaagcggagtggaaggatccttctaataaaaccgaaagcgaaatgtttcctttgtttgcataatcctgcgaagtcgttttttcggtaacactatttaaagtaataggagccggagttccgattgcttttgaataaggagacgattgtagtaaaactgtttttttgattccgttttttaatgtatcaatcggactggcgaaatcaaatttgattccccccagatttttaacgatcggatgttgactgcctggctgcaccagaggagcatacttccatataaaatcctggtattgtgtagcgcttccttgttcgcctgtagccagtttaagcggacttccttgttcgtccttgatcagatcaggattgattcggattccgtatttaaaaaacatatcgttaagattcagatctctgggataagccagagtcgctcccgcctggttgtacaagctgtccatatcagcggcaacctgatcaattaaccataaagttttgcctccattcatgatgaattggtctaaaacctgtttttcctcatccgtgaaagtttcggttggctttgagataatggctaagtcatacttttttaaggccgctaaagttcctgttgggttttgtctcacagaatctaatgtaaacggaccgatataatagctttcgcgaatttgctggagcattttggcaatgtgaatttcgttcagttctccatttccttttatgatggctacctttttttgtctgtctttactaattttattgatcgcatctgcaatcgaatattctaaatgctgaatcgatccgattactttttgcgttgttgaagctcccatgatgtttttcaacaatgggatattgacttctttgttattgtaaactgcaacagcccacggaaaaaccatagcctgcgattgttttcctttatcgtcaaccgtaatgtttataggggtaagacctttttgatacagcgatttaataacgtccatgctttcgtcttcgttttccagaggattaacgaattcaaaaacaatattactgttgtaggcttgaaattcttccaataactgacgcgtctcttgctgaagacgtctgaagtctgccggaagttcgccctgcatataaattttaatcgatagcggattctttacctgttttacgatttgtaaagaagtttcagataaagtataacgtttgtctttggttaaatcgaatcggtgaaagaataagcttcccaatacatttaaagcgattaaaacaaaaacggtgatgcctaatgtcttaacattatgttgagtagataacttcattacgctttaaaagattttaattgataaacagtaaacgagaggaacaatgcggtgatgcttaaaaaataaatcacatcacgagtatcgattacaccgcggctcatacttttaaaatggtcctgcattccaaatactgaaacaatagcagaagatccgggaatcagtgatgcgagtccttcaaaaccaaaataaagaagaaaacacagaaaaacagctatgataaaagcaacgatctgattttcggacagggtagaagtaaagattccgattgccgaataagcagcaattaaaaataatagtccaaaataagaaccgatagtacttcccatgtcaatatttccttcgggagcacctaaacttgaaatgactttcacgtaaataagtgttggaacgatggccaaaacgattaataagaaagagcccagaaattttccgtttacaatttcccagatcgataaaggcttggttaataataattccagtgtcccttgttttttttcatcagaaaaacttctcatggtaacggccggaatcagaaaaatcagaatccacggagccagggtgaagaatggcgttaaatcagcataacccgtatttaaaatgttgtagtcgccttcaaatacccataaaaatagtccgttgctaattaagaaaatggcaatgactaaatagcctataggagaaccaaaaaaggattttatttctcttaaaatgattgatttcatgtataacgtttattcgtttatttgtttaatcgttggtttgtttttggtgcttgaaatatcttaattatttttcgtgtgagattcttaaaatttttgaatttcgagcatcaattataattaaaaaagcacctcctttagaatttttaggcaaagttccagtgataaaccagtagtatttatctaaaaagtatatttcataaggtcttttttcaattatattttgttttccataaatactaaataaaactgattctgcgattttaactgcagtatttttgtctttcaaaagtatcctttcattatcaacatagttttctcgtgtttcttcggataatgttatttctaactctttttgtgcatattcttttcctagaagtaggcgtttattttgcgaataagcgttaaaagaaaatattaaaagtaataagaaaaaatatttcataattagatttgttttaagtcgctttcctttgcgaactttgtgttttgccaaagcttttaagcacgatctttgcgttctttgcggttaaacagttccaattttcaaatccagtatggaacctgaaacttgaaacctgaaactattttttatttagttcagactcaccagcttatccacactccaggcttcgggtttggcattaaacaattgctttgtaaaactccaaaccgtattaaagagttcagattgtctgtaattttctaaatcttcttcagtttcccagtagctgtaagtgaaaaatatgcatttattatttttatcccttaatagaccgtgctataacatcaattgaataacataataccattgataattgaattacattatttacgctctactatctttcataaaaacattatcttattaaaaaaacacaagtgcttcttttttgtcaaagttttattcaaaagaattgtgttttagcaagtaattgtttaaagttgcacaatatttaagctaaagaaaatccttaataaactattcctaaaaattgaacgaactgcaaaaattgaaatttgacttaaaacttaaaaatcatgtttggttttggagctgctattttaccttaaattttttaagatggggagcctactttaatgactactcctattcgttcaagtcaaacttgatagaattctctttacacattccattagtctattttaatttatttgtactagttcctcgtttggtgctaaaacaaaagtacattcagtacacctttatgatggtggctagcctattgggggtctacttaataaaaaccggtcttacctattatcttatatccgaaaatatctggccggaagcgaaccgtgaataccacactttcgacattaaccacgtactggcagtctgcattggagaattgtacgttgttgccatggcgtcttccgtttaccttaccttaacctggttgcgagaacgtgaaagaaaccgatcattaagagaaaatcagtttaagatcaaactaaaatatctggaaaatcaaattcagcctcatttcttttttaatacgctgaataacttgtatgctttgtcgcttgaatcttcagataaagtaccggatgtaatcttaaaactgtctaatttgatggagtatgttttatacgatgtcaaaggaaccaaatctgttcccttaatcaaagaaattgattacatacaaaattatatcgaaatcgagaagttacgttttgaaaatgtagaagttacgatcaatctggaatccaatatcgaggatattgtagtacctccgctgatctttatttcattggtagaaaatgcctttaaacatggcggagtcaataacaacaatataaaaatcaaaatcaattgtaaagttatcgacaataaaatgttagactttgaaatcttaaataattttgtaatttcacaaaatcttaactcgaaaggtggtattggcctggcgaataccaaaaaaagattaaaactgatttacaagaacgattttagtctaaaaaacacaatcaaattaaattactatataatccgtttgcaaatacctcttaataatgaaaattaaatgtgtgttggttgatgatgagcctttagcaatcaaagtcctgcaaaattattttaccaattttacagattttgaagtaatcggtacatttaataattctttggaagcgcttgattttataaacagtaccactgtcgatgctgtattcttagacattaacatgcctatgatgacaggattcgaacttattagcttaatcgaaaacaaaaccaaagttatcatcacaacggcttttagagaatttgccgccgaaagttacgatctggatgttctggattatttagtaaaacctatcccgcttccaagatttataaaatgcattaataaaatcaccaccgaatacaatttaaaaaacaatattaaagtcgaaaccgtaaaaggagactctcatatttttattaaagtcgataaaaaaatgatgaaaattaatattgaagaaattctttttgttgaaggcatgaaagaatacataaaagtggtgacttctgacaaaacctatattacacataaatcgttaacttctttatctgaagaattaccggctgaccgattcctgcgcattcacaaatcatacgtaatcgcactcaacaaagtaaaatctatagaaggtaatcgtattcaaatacaatcctacaccattcctattggaagaaattacagcaaagaagtaaaaaacaaaattctggaataaattcagcttcctaaatcgtttttgtaactcagtaaaaactaacacattgttgaaaaaataatgtcgttggtttaaatttaacattatttgtagctttttatttttttttgatacacttaacaaatatatttacggtcttcaaaaaacaataaaataaaaaattaacctcttaaattatgagttcagaaaatgttcaaaccaaatggggacagtttatctcgttgataattgttttcttcttttggggttttgttggttctgccaatgacatcctgattcctgttttcaagaaagtattcaccttatcgcaagtacaatcacaattagtagcctgggccttttatgcggcatacttcgtaggttccttgattttctttttggtgtccttaaaattagatgttttacaaaaatttggatacaaaaaaacactttctgccggtttactcctatctgccgttggatcatttttattcattcccgctgcaacaatggaaagcttccctttctttttaaccgctttatttacagttggattaggattctctatccagcaaattgttgccaatcctcttgccattaaaatgggaagccctgcaacaggtgcacaccgtttgactttagcaggtggaattaactctttcggaactacaattggcgctatcttactgggaatcgctttattcggaatgggagacaacaaaaaaacagctctttctttagaggacattaaactgccttttattattcttggacttgcttttatcatagtagccgttttcatgaacttctccaaaattgaagatcctgcaaaagaggacgaagaagagattaaagtagctcatgaaaaattcaacatactagactacccacagctttatttaggaatgttagggatttttatctacgtaggtacagaggtaaccatcatcagtaacttacctgccttattgcatacacatgaatttggaaacatcctggaagatgctattgccccatttattgccttatactggggaagtttaatgattggccgctggaatggcggggttaacgttttcaacacttcaaacttagtaaatacagcgcttaaatttattgttcctgcattggcatttggagtaatcattggcgctaacctttttgccgcgcacgatgtttcttctttttacatttacccaatctggatcttactatttatagcagtaagttttgttggaggtaaaaatgcaggtaaaaccttaatgcttttcggaatttctggtgtgttgatgatgtttgccggattggtttacccggatccgcaaattgctaaattcttctttatttccggaggtttattcttatctatcatgtggccgtctatctttgatttagcaattgccggcttaggtaaaaacactggaaaagcttcttcattcttaatcatgatgattcttggaggaggaattatccctttaattcaaggaagcatctgtgatatcgaccttacaagtccaaacggaatttttggaatcacatggacacacttctcctatatcgttcctcttttaggttttgcttatttagggttttatggtttctattgccctaaaatcttaaaaagacaagggatcaaccacgttgaaggcggaggcggaggtcactaaaccgaataaaattttaaattccaaatctcaaattccaaattccaaacgctcactaaaggtttgggatttggaatttgagattttttttagtactactttcctatactcacaacaaacgagacaggctacaaaaatctgtcggttttatatatacaacataaaaaaacgccatctttctattgaaaaatggcgtttttaagtttttattagctaaggactacttgtttcctttctcgaaatcagctacaaactgagccaatccaatatctgttaatgggtgtttcaacaatccataaattgcagaaagaggccctgtcataacatcagcaccaatcttagcacaatttacaatgtgcatcgtgtgacgcacagaggctgctaaaatttgcgtttcgtaaccgtagttgtcatataccaatctaatctcttcgattaaattcaatccgtcagttgaaacatcatctaaacgacccacaaacggagatacataagttgctcccgcttttgcagccaaaatagcctgccctactgaaaacacaagagttacattcgttttaatgcctttatcagaaaaatattttgccgccataacaccttctttcgtcataggcaattttaccacgatttggtcatgtaattcagccagctcctcaccttccttaaccataccgtcaaaatccagcgcatttacttcagcacttacatctccttcaaccaaattacagatgtcaacatagtgcttcaaaatgttgttttttccggtaattccttctttagccatcaatgatgggttagtggttacaccatccaaaactcctaaagcctgcgcttctttaatctgagctaaattagccgtgtcaataaaaaatttcataatctatttatatttaattgtgtgtttaaaaatttcgtgcaaaattacaacttataatgattcatcagcattttttcataaactttatccggtaatgcacgttttaaaacaatagagaacttctgcataaaagcccctactttataatgcacttttggtttttccttttggatgattttataaacagcttcagccatttcattcggattcccccctgcatcaacatgttcgttcatcgttgccagaatatcgccatacactttttcgtaagccgaacctttaaccaccggtgcatgataacgacctgctgcaatatttgtggcaaaatcacccggagccacattcgtaatttcaattccaaacgacttcacttccattcgcaaagcctcggtaattaattctaaagcccctttggaagccgaatacacactgcgatacggcaatcccatataacctgcaatcgaagtaatattgataatcaaacccgatttttgctctcgcatttgaggcaaaaccgccttcatcacttcaattggtccgaaaaaattggtttcaaaattattcttgatttcctccgtcggaatctcctctaagggtccggtaattccaaccccggcattattaatgacaacatccagccttccggaagctgcaataacctgagctactgccgactgtatagaatttgcattacgaacgtccaaagcaaccaaaggaaaaacagaatgctgtaccttttcaggatttcggctcgttccgtataccacgaaacctttttgatgtaaatactctccaattgactttccaattcctgaagatccgccggtaattaaaacaactttactcattatttaagttttgagttatgagttatgggttatgtggagaaatttttaatttccaacacttaactttaactttcaaaagggtcaaaaataaaaaaatcctccataaggaagactacttttaaattaattctaaaaaaaaatcccgaaagatcgggaactaaaaaaaaaaaaaaatggcaagcgacctacatcgcaccgctcaaccacgtacccttgctatgttcccatcctgggggagtctgcaggagctggtcgtgtaggacttgccggtgcaaatatacaatctttttatatttttgcaagacctttgttgctataaaaatatcatcgtatattggcttattcaaattttaaactatgaaaaattataacttcctaactgtcattttattaggaatcacattaattggatgtggagatacaaaaaaaggtgaaaattctttgtttactatcgatgattcggcttttccggcccattttttacctcaggaagccatttcgatcggtgttttaaacccaaattcgaaagaaatcgacagcattgcctactttgtaaacgataaaaaagtgggaagcactaaaggtgcggaaaaattcaaatttgaattaaaagaacaaagattagggtatcagtacctaaaagctaccgtttattttggttcagattcctcagatgccactaaacgtgtggagctggtttctgatatcgaacctaaactattaaagtataaaataatcaacacctatccgcacgacaaacaagcttttactgaaggattagagttctataaagacactttatacgaaagcaccggtcaggaaggagcttcttacttaagaaaatacgattataaaactggaaaagttttcaaacaaattgacttagacaaaaaatactttggtgaaggtattacgttcatcaacggcaaattatttcagctgacctggcaaaacaaaacaggttttatctacaatgccaacactttaaaactggaaaaaacctttgcttacgagaaagatatcgaaggctggggaatgacgaatgacgggaaatacatttatcaaacagacaaaacagagaaaatctggaaaatggatcctgccacgcaaaaaatgatagattacatcaacgtatactcgggaacttcaaaaattaaagccattaatgaattggagtggattaacggaaaaatctataccaacgtgtggtttaaggacgctattgctgtcgtaaaccctgtttccggagctgttgaaggaattctggacatgtcaggattacgcaaattgatgactgacgtaactaaagatgacgttttaaacggaattgcttacaaccccaaaactaaaactatttttgttaccggtaaaaactggaccaaaatgttcgaaataaccgtttctgaataagacaataagaacaaatttttaaacacagatttcacgaatttcactaatctattgtgtgataattgtgaaatttgtgctttttactttatacctcaaaataatgacaactcttataacaaacataaaagaattacttcaggtccgcgaaacttcagtcactaaagtttccggagcagaaatggccatacttccaacactgaaaaatgcctatttaattctaaaagacgatcttattcaggattacggtctgatggaaaatcttcctgaaaccaatgctgatctgacaatcgatgccacaggacgagttatactgcctacgtggtgcgacagccacacccacattgtatatgcaggtaatcgcgaacaggaatttgtagaccgtataaacggattttcgtatgaagaaattgcgaatcgtggcggtggcattctaaactcggctaaaaaactcaatgaaactactgaagaggaaatctacgagcaatcgaaacttcgtttagaagaagtcatgcatttgggaaccggagcggtagaaattaaatcaggttacggactaactatcgaaggcgaactcaaaatgcttcgcgtaattcaaaaattagctcagaattatccgattgccataaaagccacttttctgggagcacatgccttccctttgcattacaaagaaaacaaagcaggttacattgatgaaatcatcaccaaaatgctgcctgagattgcccaaaacaaactggccgattacgtagatgccttttgtgagactggttacttttcagttgaagaaacagaaaaaatcatggaagccggaatacaatttggactaaaacctaaaattcatgtgaaccaattcaattctattggcggaatacaggctggaatcaaatacaacgccctttcagtggatcatcttgaaattatgaacccggaagacattgaggctttaaaaaacaccgaaacgatgcctgttgctttaccgtcctgttcttattttttaagcattccttacaccccggctcgtgaaatgataaaagcaggtctgccaattgccctggctacagatttcaacccaggttctactccatccggaaacatgaattttgtcgttgcaacggcttgtattaaaatgaaaatgactcctgaagaagctataaatgccgctactataaatggcgcctacgcaatgggaatttcagaaacacacggaagtatcaccagaggaaaaaaagccaatctgatccttacaaaacccgtttcctcttactatcaaattccttacgcttttggaagcaatcttatcgaaagtgtttttcttgaaggaaaaattctaaaacagtaaaataatcgctagaagaaaattgttttaacacatagaaacataagctctgtactggtacaaaaaaggcgctccactttaaataagccacataacactatgtaaacgaaacgtgcctctccaaccttcttttagagctgtaaaaatctatgtttctatgtgctaaaattaaattttatccgagtttacccaacgcgttaaagcataaaaaaaggtctgtgaaaaatcacagaccttttttacttttagtggtatttgtcctaaacggcgtattatcttaaagtgaaactagttttagaaactaattcgtcattgtcaaaaacgttaataaagtaagttcctttttcgaaatctttaccaattaaatcttctgaaacgtttactgttttattttcatatttcacagtagttttaaagctatacgttaaagtattatctccaaagctttctgttttcttttctcctaaaacattgtttttagaatcaataacctgaacatagtacgttttatctcctgatttagcgatttgattttcagcaattgtaaagcttactttcaatacatcagcacggcttgctttatcagtttcaatttgcttaccagagcttcttactttataagcaattgttttagtatttaagactgataatttagctcctttttcaactgttttagccaattcttcgttttgaccaaccaaaacttcattgtatttcttagactctcctaacactacaattgtactgtctctttgaactgttaaaacaccattttgttttttcaactcatcgttttcagcaactaaagttttcattttaccttgcattgcctgaacttgtgatctgtacttagaaacatctcctttagatttatttaaatcatccataagagcgactactttatctctttcctgaattaactcatcagacattgaagtattttcagcaatcgcagcatcataagttgcttttaattcctgtaaatctttcataacagattctttttctgtcatcgtcgttgtaagttcagttttaactacatctgtatcagatgataatttaaaaatatacactaagctaccaatcagtaggactgctaaaactgcgattaccgcttttagacttgagttgttgttctttgggttttccatatttaaaaaattttctttaaaacaaatttaagaattaatataaggtaataacgtaagttgccacaattatattatttttggaaaatatttttttttcatggagaaactaattccttttactgttaacgatttggcaaaaatcaccaatcatcgaagtggtgaaataaaatttggagaaaaaatggtcatcatacccaaaggggctgacaagatcaattttctaaaaggaagtgaggccaaatatgtgctttttgggatacctgaagatattggggtacgcgccaattatggcagacccggagcagcatcggcatgggaaagtgcgataaaaagcattgccaatattcagcacaatcgtttctctaaaggcagtcagattttggttttaggacagttggacgttgctcaggaaatgcgtgatgtcgaaaatcttgattttaatgatattgacgacaggtccaagctaagtcagttagtcgaaaaaattgacaaagaagtttcacacattatctttacacttataaaagctggaaaaatacctatcataattggaggcggacacaataatgcttacggaaacataaaaggatcggctttagccaaaggaaaaccaatcaatgctattaattttgatgcacattctgattttagaatccttgaagggcgtcatagcggcaacggtttttcgtatgcctatgaagaaggtttcttaaaaaaatacttcatttttggtctgcatgaaaactatacttctaaaagcgttttagacatcatcaaaaaattggaagaccgcgttcgttacaatacgtacgacagcgtcggcattcgcagggaaaaagattttgacagagaaatggctttggctttagaattcatcagaacagattcttttggaatcgaaatcgatttggatgctcttccgaacattgccagcagcgcgatgaccatcagcggtttttcagtagaacaagtacgtcagtttgtttcctttttcgggcaacataaaaatgcgacctatctgcatatttgcgaaggtgcgccagatttggccgattctccgaacaacaatttaattggcaagctgataggctatttagtaactgattttattaaagcgaataacgaaaaaatctaatcgcaacagaaactttagcaatcaaaaaaaataggcgtttgccaaataaagcaatattcaattaaaggattaaacgaataaacctatctttgcactgaattttagtacttaaaactaaattcttaataagtcaagatatgttattcgaagatctgtcactctcaaaaagtatacaaaaagccgtatttgaagaaggctacttaaatcctactcctattcaggaacaatcgatcccgatcgttttgtcaggaagagatttaattggctgtgcacaaaccggtaccggaaaaacagcagcatttgctattccaatcatacatcaattacaccgaattgtaggctcgtctaaaaaggccaaacaagttcgtgctcttatagttactcctacacgtgaattagcggttcagattgggcaaagttttgacacttatgccaaatataccaacttaacacaattgactatttttggaggggtttcacaaaatcctcaggtagacactctaaaaaatggagttgacattttagttgcaaccccaggccgtttacttgatttacacaaacaaggattcctggatctcgatcatttacacactttagttctggatgaagccgatcaaatgctggacatgggttttatcaatgatgtcaaaaaaattgttaaactaactcctaaaaacaggcagactttattgttctctgctactatgccgattgccattcgcgaactggctgaaatgtttttaaaagaccctgaaaaggtagaagtttcacctgtttcatcaacggcagaaacagttgagcagcgcatttactttgtagaaaaaacagagaaaagaaatttattgtatcatttgatcaaaaatgaaaacctgtctaatgtgctggttttttcaagaaccaaacatggtgctgacaatgtggtaaaagcgcttcgtaaaaaagacattcctgctgaggctatccacggagataaatctcaaaatgccagacagcgtgttttagatgcgtttaaaaacaaagaagttggcgttcttgttgcaactgatattgctgcaagaggaatcgatattgaccaattgccttttgttatcaattttgatttacccaacattccggagacttatgtacaccgaattggacgtacggggcgtgccggaaatggcggaattgccatttcgttttgcggtaaagacgaacagccttactggaaagacattcagaaacttataaaagtagaggtaaaaaccattaccgatcatccttacccatggcactcaggaagcccggaggcgacggatgaaaaacctaaaaactcaaaccgaagcggtggtgctcataaatcgagaaaatcaaatgcttctaaacaaaataaaaaacgctggtactaaaattaccgtgtgggcacaagtataaaaaataacacgaattgcacaaattgtcactaatttgtttatggaattaatttcacagacaaggttatccttttaagatttgtgaaatttgtgttcacacggtagactacaactattccgtttagtatcattattttactgtattgggcataattttaacacatagcaacataggtgctgcacctgcaaaaaagacgtttcactacatttaaatgcacatatcttgctatgtgaaagtttttttttgcatcctcttttaagaattaaaataggaacgataatgagctaccgtttggatacaagtataaaaagcaacacgaaatacccctaatttgtttgtgaaattaatttcacaaaaaaggttaacctattcaaatttgtgcaaattagtggaatttgtgttcagacttccggatactaaccggcgtttttcgtttccagtattaagtaattcattatcttaaaaaggcgtaccggttcaaacggcttgataataatatcatttattcctgaagaaatcgcttcatctgtaatctcgtctttatcaaaagcagtaagcgctataatgggagttttaagcccttttgaacgaatccttctcgtagtttcaaaaccattcatcaaaggcatgttgatatccattaaaatcaggtcgaaattttcgctctccagcatttttaaagccgcaaaaccatcatcaactactttgcagacataattgtgtttttcgataatttttttcgtcaccagctgattgatgagattatcttctacaattagaatcttatatacctcatttgaactcagatcaacctctatttcttcaataatcagttttgttttttgaggatcgaattcaaacggaatggtaaatgaaaatgaagtcccaaagcctacttcgcttttcaaatcaattgtactgccaaaaagccccaacaatcgttttacaatgctcaaacctaagccagttccctgataatcttcatcttttcttcctacctggacgaatttctcaaaaattttatcctgatctacagctgcaatccctactccgttatcttttacccaaaaatccagaaaatacatctttccttcaaatcgattcagttttacgataatttcaacttcaccatctttcgtaaacttaagtgcattactgaccagattcatcaaaatctgagcaagtcgcaacttatctccaatcagatattccggaatacagggatcaatagaaactgtgattttatcattgtttttttgcgacaaaaaggacaacgaattcttaatcatcacgatctcatcggaaatattgaatgtcaaattctccaataccactttattctcctcaattttattaatctgaagaatgtcatttaccaacgataataaataacgggccgaaaattttaacgaactcaaatgctgacttctagacagttctttgtgttcttccagcagcatattggtgattccaaccacaccgtacaatggcgtacgcaattcatgacttatagtcgaaataaactgagtcttcaatagcgaagcttcctcagcaatttcttttgcttctaaaagctctgcattgtgttttttcttaaacctgatgtttttaattagagtaataatgagaaccaaaagtatcagtgaaatcagtacaaataaaatcacaataatccttgatttcttaagactttgatactgtgaatctttctcactttcaatcttatcaatctgccttttgtattcgtctaattctaaattaaaaccggcaatagaggcttttttgagtttctcctcattgtacaattcttctgttatcttattgtatgaggccagattcacataagcttcttcatacttccctattttgtttaaaaacttagaatattcctgatgtgaatacgacaaatccgatcgctcctcactatttttacccgcctgaattgctttgagaaagaaaacattcgccaactcataatcattatggtaactataatacatcccgtttaacatgtttacaacgatctctgtggactcatcaccatatttagtcttattgccgtttacaaattttagaaacggatatccttctttaaattttcctatatcaaaataagcccaggcaatatttacgtttgtaaaatatacctgcggcatctcgtttaattttaaactgtaggctatggattttttgtaataattaattccccggttgaactgttttttctcaaaacaataaatattaccaagattattataaagactgtattttaaggaatcgttattggttttactggcgtacaacaatccttttttatagaagaaaatagctttatcaaattccgacaattcattgtagttcccggcaattattttatatgattttgctattaaattattattcttagcggctgtagcatagtttaatgctattctcgagctgatgagtgacttttcaaaatttgatttcctatagtctccccaggcttcctctacaagtttattaatctttgcctccggcaccgtttcagattgcacaatggctgaattggcaaaacaattcagacacaccagcagtagcagcaaaagaatccgtattcggggcataaataggctaatttgaccaaatatacatcaaaaataaaaaaaagctgtatttctattaaaaatacagcttcttttttatttggactttaaaagtttttaaagtcttttcctacctgaataaaaataattataagttttcggaagcaatttcagggtctttatcatcctcccattgccccacaactgatgttgccaacgcatttcctaaaacgtttgtagcacttctgaacatatcacaaaagtgatcgattggtaaaattaatgcaattccttcaaccggaatatcaaacataccgcaagtagctgctacgacaaccaaactggctcttggcacacctgcaatacctttactggttaacattaaaaccaaaagcattaccatttgcgttcctaagtccagatgcactccataaaactgagcaataaaaatactggcaaaagtcatatacatcatactaccatcaaggttaaacgagtatccaagcggcagcataaaggctacaattttatcttttacaccaaaatcttccaattcttctgttaattttggaaaaacagcttcactactcgttgtaccgaaagcgatcgccagaggacctgtaatacgtcttaaaagctctgtcattcttcctttcagaaaaagataacctaccgcaaccagaaccacccataaagtaccgattccaactaaaaacgatccaaagaatttaaaataggtaattaccaactcttcggcatctctaatagcgaatactcctgcaatggctccgaaaactccaattggagcgaaattcatcacatagtttaccatttttaaaacgatatgcgaagtcttatctaaagcattgattaccggttttactgtacttcccaaagaggcaccagctaacccgaagaagattgaaaatacaacaatctgtaaaatttcattggttgccattgcttcaaaaatacttttaggtacaatgtgctctacaaaattttcaacagataatgtttttgttttagcagttacttctgaagcagcagccatatcaacatgatccagttttaaacctacacccggctctaaaatattcacataaaacaacccaatcaataaggagataaaagaagcagtaaaaaaccatccaagggctttccctccaattctccccacagttttgatatctccaagttttgcaatacctacaactaaagtggtaaatactaacggagaaataatcatctgtaccaatctgataaagattgtggcaagcattttaattttattgctaaaagattgtgctgcctcaggcgaaatcgaattgtgtaaaattattcccaaagcggctccaagaaccattgcaataataatctgccctgttaatcctttaagaaaagatttctttttagtttctgtaacttcttgcattaatttgtttgttttaaattaaaatgtcaaaaccctcactgtcttaacttttataaatacgttttgttgatcaaataaaaatcagccaaaacaatcgcagccattgcttcgacaattggcactgcgcgaggcactacacacggatcatgacggcctttaccggtcattggtgtaatatttcctttattatctaatgaatcctgagtctgcatgatagtcgcaacaggtttgaaagctactctgaagtaaatatccattccgttgcttatccctccctgaattcctccggaaagatttgtttttgtagttccgtcgggattgtataaatcgttgtgttcacttcctttcatttcagaacccgaaaatccgcttccgtattcaaaaccttttacggcattgatcgaaagcatcgcttttcctaattcagcatgcagtttatcaaaaaccggctctcctaaacctaccggaacattttgaatgacacaggaaactacacctccaacggtatctccttgtttgcggatatcgcgaatatattcttccataatcgctgccgatttttcatccggacaacgaacaggattgctctctattttagaaaaatccaaatcctgataaggtgtatctaaatgaattggacccaccgacgaaacgtaggcattaatttttatttcaggaagcatttgttttgctatcgctcccgcaactactctgcttgctgtttctctggcagagcttcttccaccaccgcgatagtctcgaaaaccatatttctggtcgtatacataatcagcatgactaggtctgtaattgtcttttatatgggagtaatcgtctgatttttgattggtattcggaatgataaaaccaataggcgttccagtcgttttaccttcaaaaatacctgataaaaactgaactgcatccggttctttgcgttgtgttacaattgccgactgtccgggctttcttctggacatttcaacttcaattgcatctaaatcaagttcaattcctgatgggcaaccatctataattccgcctaaagcttcaccatgagattctccaaatgttgtaactttatataaattgccgtagctatttcctgccattgtaattagttttgagcaaatgtaagttttatgaattaaattaaaaaatttaaaattggtattattaagcaaaggttaaggggattaaaaatcacaatttgttaaaattgcagccaaattggtaaccatttcataaaatttctctcacaagagtttctttcatttgttaaacttcaaaaaaagaaaaattgaaaaaacgaaatgttgaattggtcattatatcagatgtccatttaggaacttacggaagtcacgccaaagaactaaacaactacttatcaagcataaagcctaaaacattagtcctgaacggtgacattattgatgcctggcaatttagaaaatcatactttccaaaagcacatttaagagtcattcagcgtattatcggcatggcatctaaaggcacaaaagtatattacatcaccggaaaccatgatgaaattcttcggaaattcagcgatatgaacatgggaaattttgcactggtcgataaattagttttggaactggacgataaaaaagcatggatttttcatggagatgtctttgatgcttctgttcaacactctaaatggattgcaaaactgggcggactaggatacgattacttaattctaagcaatcgatttgccaactggtgccttgcaaaactaggacgcgaaccctactccttctctaaaaagataaaagccagcgtgaaaaaagccgttaaatttatctctgattttgaaactactgcaactgatctggctattgaaaaaaaatacgattacgtcatctgcggacacatacacgaaccaaaaattgtcaccaaagaaaacaaacacgggtcaactttataccttaattcaggagattgggtggaaaatcttactgcattggaataccataaaaagcgatggaaattatactcttatgccgaaagtaattttaccgaggaagaaaatctctttgaaatggaggacacactgagctctcagttaatttctactatcattctaaacaaataaacctctaaacacactgcctatcgcaaataaaactacttgaaacctgccttattgcttcttaaaaatgtgaattatataacaatttttaataatcctatacgtttcaaaattatggtgaggattaaatttgacaaaaattaataaccattttttatgaagaaaatcattttatctgccctaatgctattaggcttagcgtttacggcacaatcacaagaaatttcgaaacatgcccttggtatccgtttaggagataataacggttttggcggagaagtatcttatcagttaggattaaaccaaaaaaacagactggaatttgatttaggatggagaaacagcagtaacgttgacgctattaaaggtgtagcactttatcaatgggtttggaatattgatggcggtttcaactggtatgcaggtgtaggtggtggtcttgcaagctggaatcacgactattacaccaacaacaacagatacaaagataacggaacgtatgtttttgctgcgggagatattggtatagaatacagatttaaagaagcaccaattacactatcattagacgcgagacctgaagttggttccggatattatgacgatgacaattttggatttgacgtaggtttaggagtgaaattcagattctaattaaagacaaaaataattataaaaagaaacctgtcgtttttaatgcgacaggttttttttatgtttacagtcaggcttcgacttcgctcagcctgacattcgcttcgacttcgctcagcctgacattcacttcgacttcgctcaaactcacaactcacaactcacaactcacaactcataactcataactcataactcataactcataactcataactcataactcataactcataactcataactcataactcataactcacttcacgataatctcttttttagagtgtactttgattacggtgtacggatacgtaataacctgcgttaccatagcatctgcagcgggattattttctttaacggtgatgataatatttttatccgtttcttctaccttttcaacaccaatagaatagccaccggtatttttttctcccatattcagaattacataatttgaattactgatatcgtcctgtttcatttttgctttcaaatggggatcattttccagcattttgatttcgttcggttccgtcagaatttcaaaaaatttgatatttcctcctccgtcagattgttctgtaagaacttcatacaaaattttagaggttccgtcagcgtttttcttaaccccgcaagaaactaaaaccagaatcaccagtaccgaaattacttttttcatttacgttaacttttaagattattgtttttcgtgtttctcctgtttgtaatcatcaattgctttttgatacagcgcctcatacttaggcaatattgttttgatatcaaacttacgggcaacttctagtgcatttgctttaaactgattcaaaacgtcatcatcttttagtattttgattgcattggcagccatttcttcaacgttaccaacattgctcaaatatcctgaaaagccgtcaaaattaacctccggcaaaccacctgaattacttgaaattaccggaactccgcttgacattgcttctaaagctgccaaaccaaaactctctgtttctgatggaagcaggaataagtcggtaaaacataaaattttatcaatctcgttactatttccaaagaaaataactttgtcatagataccaagttccatacataaaacttctgctttttctttttccgggccatcacctaccatcatcagtttagacggaatttctttctgaatattatagaaaatcttgatgatatccggaattctcttcacttttctaaagttactaatgtgcgtgataatgcgctcgtcctccttggccataacataacgatgacaaggtgcctgaggatcttttctaactttatccaattcgataaaattagggataaccttaattttattcttgattttaaacaactttaaagtatcatctttcaaactctgagaaaccgatgtcacataatctgatttattgatactaaaggtcactgcaggtttataaaaggggtgattcccgaccaatgtaatatctgttccgtgaagcgttgtaatcattggaagattaatcccttcatttttcagcatttgcttcgccatataacctgcatatgcatgaggaatggcataatgcacgtgaagtacttctattttatacaatttcaccatatcaaccaatttactggacaatgccaattcataaggctgataatgaaaaagaggatattcaggaacgttcacttcgtgataatgaacattgggatttaaaagtgccaaccgaactggctgactgtaggtaataaagtggatttcgtgtccgcgtctggctaattcaaggcctaattccgtagcaactacaccactaccaccaaatgtcggataacaaactattgctattttcatgtattaagtttagtaactacgaaagtacttaaaaatagcttttagttgctcttttaaactgttagatttttgtgaatagtaaacttaatatttttttcaatatgttaaaattaatatcatctaagatgaaataggcaggggtcgcgaccaaataaaaaagaaggtttttcttacattacctaaaaactccatttattacatcattaatccacttattacaaacagataaaaccatacccatatcataaatactttcgcaataaaataattgatttaagacagcttaattactcgcatcataaaatacatttaatacttctgaattataaaatctaaacataaacaaagcaacattcatattacatgcgatcaatatttaaggataccaaaaatgctttttaagtccaaaatctgtatgttcaaactaattgcattcaatggagattttatagatcaaaacaatttaagaggaagctgaaaatctttaaaagagtaggcataattaatactatttttaatatgaaaaaaattgatttaaatgaagtaaaaaagtttcgcgtagaagaactggaacaacgtcttgaaatggcaatgtatagcgatgccgtaatgggtaaaccttcgaaaaaaaagaagtaacccaagtactaaaatgctaaaacaagagggctgcaaatgccctcttactcctttaataatatattagctttctctgcaaaataaacacaaaaactgatttactacaaagtatgtttaattttccaaaagcagaatgttatagatcactttcctcgaaattaagatggacttctacgaataaacaagacatttttaaaccatcaaccataaaatgatcttaaatcttgaaaattagttataaaattcttttaagataaaatttaaaaaactcatagtataaaaaaattaggtcattgtattgacaattttcatgacaaaacacaaattaatttaaaaataacataatctaatgcatctagaaaaagtaaatgaatatctaaaatctgaaaggataaaaaaacaattaataaatggcagacttccgaaaccctttcacccatttgtactgaaagaaatcgagaataatctccagagtccttacatttactacgcctatctgtttgctgagccatttgactttaccgattatgagattgtcgaaaaaatctgctatgcctcattattatataagatgtctttgctggttttagataaaataacggacgggcaatttgacaaagaccaaacttcgaaagtaacacttgttcaacatgctctcgaaaaagaaagtcttagaatcattgttacagagcttggtacagataaggtaagtattgacaagctttgggaggccatcgagaaccgtacaaaagaatggtaccagtcgtatcaactcgaaaaggaaatcaaaactaaagactttgatatcgctgattttgaaaaattatcagaattaaaagtatctgtcgctttaattcctttggattttatcaaagaattctccaatggaagtaaagccatctacgataaggtaacaacaatccataaactattctacatagcttaccaaatcctagatgacattattgactttgatgaagatctaaaaaatggtcagtacaatattgccatacacaaaaccaaaaagcttttgaaagacaacggattatcctctgaaaatttaaatagtcaaatactttatgtttatgcctttgacgatctctataaattagccttgacttatatcgataaagccttgaatttatgtttaggaatgaatgcttatcttttagaacgtagactattaagtacaaaagccctttttgaaaataaaaactatatgcgactgaaagaatgcgtcgagagcaagattagcatcccttttgaagaaaaaattcaaattattaagaagactgaaatcaataatgcgctatcccaaccggtaagatacattttaaagaaatggtctcaagattttattgatcttaactacatacaggctcctatttcattgaacgatttgcttacaacgcattatgctttgggagacacatttctaagagcgatggccacaacccatttgattgaaatacaaaaaaaagattcattaaaagaaattataacagaggaacaaaattacatcctgtcacaaatcggacttgataaaatgggctggtcgtaccatcctctgttaattgaagtaccctatgatgcagattctttaggtcaaatattacaatctttttcaaagtattacgataatgaattatttcatactttgtttgaaaatccaattctatctttactgaaagtaacagagtccaatcatggtatcttcccaacttggactatttttgaaagaaattcaaaacaattaaatttttataccgataaatactggggaagagataacgatttggctgtcatagccaacatggggtgtggcttatatatcgcaaaagaaaagacaaatatacttaatcaaagtgattttgagcgcattataatcactaatgcagattaccttgtaaataatcaggaaaaagacggaagttttggtttgggcagcaggtggtattcgggatgcttctaccctacctacatctgccttaaatttttatataaagtagatcccgtaaaatacaacgaagccataaaaaaggcacaatcatggattatcaaatcacaaaataaaacggaaggtcgatttgggaaagagaaacatgccagcacggaaacagctttcgctgtattaacacttttattcgaagaaacaccagattctgaaatagtagaaagtataaaaaaaggaatccactttcttgaaaaagaaatgaaagaagatggagaatttagaccatcggcctttataaaacaaacacttacaattgaaaataaaatgccctacttatgggcgaataaagttattaccacaagcttctgtgcattagcaattgaaaaatataaatctcttactccagaatgaaatgtctcaccagaaaatttataagattgctactgattatgaaattactataaatgatttcggacacattttgactataccaaaatataataaatcatttatcataaatgaatttattgcagaattcattcaaatttggaaacaaactgaaaatttagaagaagcaaaaaacaaactaaatctaggcgattccagtaatgatgaaattatctcaataattagtcaaaatctttttaacgctttgatagatgacacttcaaatattgatttaaaaaagaatagagatcaatacataaaattcaaatgtaatttattatccgaaaagtccactgctttattctgcatcattctttatccactgtttcatcgtactgtttttataagtacatccattttacttatttttctacttttctacaattaccttatcattgacaaatcgattatttatgattcattttcattctatcttataacattctttatcagcactatctttcatgaattgggtcacgcctccagtttatacaagtacactaagaaatcatgtactatcggctgtggtatttacttactaaatcttgttttatatacagatgtcactaatgtatggaagttaaaaaaggcacaacgattaatcgttaattttggaggtctgtactttgaaatgattatgctaacactattacttgccgctaatctatttttcagatttaatcccacacatttactttttatctatttgcttcgttttatctatacattagatccattatatcgctctgatgggtattggatagtatctgattttttcgccatacacaatttaacagaaagacttaatgaagaattgaaaaatgtttttataaaattcaataaaccttctaactactggttgttaacatataaatatcaggttcaaataagaaaaatcagagcgagtaatggtaatattgttgtataaaattaagaaataaacgtatttatgagaaaaaaaggattgcttctatttataatattgattgttatatcttcctgtaagaaagaaaaatcatctacagagattattacttcagatggagtcgttacaaattttgaaggggtcgatttgttttctactgaagatttgtcttctaataaaaagtaccacttggattatgcgtcaaaagttaaaattgtgtcttttgataaggttaaaaatagatcaaagattctatacaaaaatcaagagctgtatgtatctcttcgcgatattgagttactttctaaaacagaagagagtcagagttattttacaaacgactgttattgcctactgggtttagacagaacaaagactattaattttccaacaaaatatgataccgttcattattatacaaaggaagggaaaattaggcttataaaagagataacgtcttatcaaccaagttatgaaacttatataaagcatgatgtcgagatttcgagagaagattataactcagaaacgccagacttatattcctattttacaattgataagaatggtttttttattgggaatctttacaaagtaatgaacacatcttttttggaatgttataataagaaatcatcgtatgcaattactgatggcctggttaaattacaagagaattccggtattagtgcggaatttacttatgcaatgtatttgtttaacactgaccttttgtatgcaaaagttagtatggatcgttttgtaaaaactttacctaattttgattataaaaaggaagagatttatattgaacaaggtgatttgtatttggaaaaaataactaatataaaattatataatgttgataatttagaacctgttgactataatgattttgcaatagtgtttaattatttgagagagtttaaaattattaagaaagatgggaaagaaaagtactttgtaaaaatcaatgtagtaggaaatgaattatcccctttttcaggagagtactacatagatttaaaagaaattgcaatgtttgcttcgattccggattaggatgtttctttaagaaaagattcataaagatagaaaccgggttaaaagaaattgatacatcgatgtgaaatcttgaagagaacacttcactcttttattcaaacaaaaaagctgcttcaaataattgaatgcagctttttttaattttataataaaaatgaagttcgtttgaattccttatttaagcgaggtcagataaaattccgggaatgtttttacgggagtgttggtcgcgatgtcaaatgcaatatgggtacacattcccgctacgagccaggatgcaatagggagttggggaggagacagatttttgttttcctttttgtatttgtccagaatttcttcgagccatttttgcggattttcccaatagcgcatatactctaaaacatagtcgacaacattcacttcgctaaatttttcatctgacttttttaaaacttctaaaccttcatcttttgaaatgaccaataccaatgcaccccatcctaaattatagggatgtaataccggaatgtttttctgctgacaaatggaatcaaatataagcggaacatcagaagtaaaatccagagcgttgatcgcaattttatggtcggtaatgtaattgccaacattttcgggtgttaaaaagcagttatgaatcgtgatttttgcctgactgttgatcgacaataatcgttctttaagcgcttctactttgggttgtgcgatattgttttcggtataattttgtcggtttaaattggacaattcgacaacatcaccatcgatgatggtcagggtttcaaaacctaatcgcaataaacattcagcaatagcgcttccgatacctgccccgcctaataatatcggagtgttttttattaattcctgctcttcagggctgatgtaaagcctatttctgatgtgcctttcttccatatttattttttacaatcgttaaaaatttatccttttgataaagaaaaatgagacaacaggaatcctgaaatttctcagaactgttcattttttaatctgtatcagagctaaagtatcgaaaataaaattaatatcgaaataccaaataactaaatgtcattgctttaaaatgtgttcgtgcaccattagttttgtggcagaaattaggatcaagcttttgtctcaggacgaaatgaaagtgcaataaaaaaaggagatacctaaatatctccctcttttatgggcttcaacagcccacgattgtgcacaacgtttaaaaaatgcacagatgtaaaaaaatggtacttttaattttgaaatttagcaataccggatttcagccattgctcatattcggtaatgtcaggagtgtatcctgcaggtttgctcagcttttcctcattcgtatctaacaaaatatagtacggctgcgcatttgctttgtagcgggtaatttgaaaatcactccatttatttccgatggttgtaatctttttaccggtttctttggagacatattgttcttcaagaggtaattctcttttgtcgtcaacatataaagaaattaaaacgacttcattatttaagatggacaaaatacgaggatcagaccagacataatcttccatttttcggcaattcacacaggcaaatccggtaaaatctaaaaggataggtttgtttacacttttggcgtaggctagtcctttttcataatctgtgaaagctgtgatgtcatgagggcctttatgtgctccgtctggtaatactttttcagcggatgaggtgttttttccactcccacccacgccatacggagattcgctatacgtcattggaggagggaatccgctgattaatttcaaaggagcaccccacaatcccggaatcagataaatggtaaatgttagtacgattaatccaactcctaaacggcctaccgaaatggatgaggttggggaatcatgtggcaaggttatttttccaaataagtagaaagccagtgtaccaaatatagcgatccaaatggccagaaagatttctctttcaaaccagtgcagctgtagcactaaatcggcattagataaaaatttaaaggccaaagccaattccagaaagcccagaaacacttttacggtattgagccagccgccggattttggcaatgtgtttaaccagcccgggaacatggcaaaaagcataaaaggcaatgccaaagccgatgagaaacctaacattcccacaatcggtgcaattccgcctttagaagctgcttcaaccagtagagttcctataatgggacccgtgcaggaaaaagaaacaattgccagagccaatgccataaaaacgattccaatgatcccgcctttatctgcctgctgatctactttattggcccatgaattgggtagcatgatttcgaaggcacccagaaaagaggctgcgaacacaatcagtaagataaaaaagataatattaaaccagacattggtagataaggcgtttaaggcatcagcaccaaaaagcagcgtaattacggagcccaaaaatacataaatcaggataattgaaataccataaataatggcatttttaattcctttagctttcgttttactttgtttcgtaaagaaacttaccgtcataggtatcataggaaacacgcaaggggtaagcagtgcggcaaaaccggataaaaacgcaataatgaaaatcatatacaaactggaatccgttttttcggattccgcttgtttttctatggtgggatttactgttgttttctcggttttgtcgtttgtaatgtcagctgcctgaatttcttttgcttcaagcgttttgagattgaattcaaagtacttggtttcgctaatacaattctctttacatacctgataagaaagctctacttgtacgacttctttttcgggattggtctgtttgattaattgggtaaacacagctttatccgaaaagaaaatttcatctacaccaaagatttcattaaactttcggtgagtttcgctttcggttgcttttccaataagttcataattgtttttggaatcatgaaaaaggaattcagccggaagcggaccatcttcgggagtgaattgcgaatagacatgccagtctttctcgatagttcctttaaaagaaagctgatattccgaatcggattttttctcgatcgaagcttcccatttcacaggatttataatctgcgcctggactttggcaaaagcaaagaacaggaataatacataaattattttcttcattttataggtttaatcagaacgatttgttccggttgtaatgggatttatttacttcgttacattgaaaaaagtatattccagtttcaggaaaacgccatcggttgccatacgctgcatagagctgtacaactcttttttgtaagctaagtcaattctcgcctgactgttgatgataaactggatcgaaggaactacatccaggtacgatcttccattttcagtaatagtttgtcctgtaaactccaacattgcattaatattggtttgtttgtaactggtatattttttaggatgcattaatttacccacagagaaggtataatttatggcatttttgcccagcatatccggaaaactgtaatcggcattgttaagagcacgcacatagcttacggaagaacttatagctactttatgaagcaactgtgtggcaaccaaaccggcttcgtaacctgaatttccattggctaaatctatggcttcctgattaaagtaagagttattgtaactgtatcgcccaaaggcagccatcctgaaatgactttgcaaatcatctgccgaaaagaatcggtatttggcataaaatccaccacctttaaggcccagtccattgtcctgattgcttaaaaaagctgaggtacgaaccatcaggtttttattgatcccccaggtaacttccggggttaaattgtacatggaaccgctttcgagtttcttttccattaaggattgtccaacacgaactccaatagaacccgccggagcattactggcaggttcggttactacaaataattcttgtgcttcaatttgataagaaaccagaaataagaagattagggataaatatctcatttttaaagggcttttaaatagtaatcattctcattttcagtcgcgtaatcaggatattttgagtacgatttaagtagttttttatactctttctgcgtcacaaaacctttgtctaaaaccctgtacttcccttcggcatgtgctacaggctttttaatatcgataaaagtataggtggcatcatcgattttcagagtggtattgtcctcaattttgtctacatgaaattttgctgttaaaactagtgacccaacaaaaaaaccggctttttcaactgcttttttcaggactttaggctccaatgaattgtcttttttaaagtatactgtaaacgtattggtatttaaatctgtactgatactgtctacttctgtaaaagctttcaactgtttgtttatggcattcgagcacatcgaacaggttaatcctgttgcgattatttcggcttttgtaatttgagagtatgagtttacacctgttaataataggataagtgtaagagctatgaattttatatttagagttttcatcttattttttgttttttttaatttgagcaattatttgagcttctgttggattgatggcaaccagttttcctgatgcatcaaaaagaaaagcagaaggcagcgcttcaactccgaaagtcagagctgttttggcttcaaagccttttggatcaattaattgctggtgtttcattttgtctttttcaatggctttcaaccattttgttttgtcgttatcgattgatattccaacgatttcaaaattctgatctttatattgatcgtagattttaactagctttttgttgaccagtcgacaaggagcacaccaggatgcccaaaagtctactaaaaccgtttttcctttaaaagaatttagtttggttgtagtattcttattgttttgaagctgaacatccggaaaagtatctcccacttttatttgtgcatttgtcatagaaacagttgctacaagtgtgaatagtgtgattatattttttattttgaacatgatttctttttttatgtttgctcgaaattggttttaatgatgtgacgatgaagtactttgttttttatcgcttggttctctgtcgtattgacaacatccgtgtagttcgtcataaaccgtattaggagccttaaatttttcattatcatatccggcatcagctatgcgttttagaatgacatcaagattcgtcttttgagcatcgtaagtaacagtagcgattttggtgtcttcgttccagattactttggcttctttattaacgtttgcggcagtttcgatcacttttttgcacatgctgcagttaccgtttacttttactttttcagtggttttatttttaatttgagcgctggcgaaagtaacggatagcaatagagacattgccatcaataattttgttattgagttcattggatgtattttttttggatgaattaatcctaaagcacagcagaaactatagcaaatagagctatctctgacaatagattaagattaaaaaatagttttgaattaaagccttaaaaagacttttggataagacagacctttggctgtcacaaaagaaatctagcttattttagggggaagccagatcgaacggaaatctgaagaaataaagatttctgaataaaagtaagtttgttttttttcagaaaaaccaaaaagagaatggttttctacctgaaagattgccattggcgaaaaagcacagctactggttggcgtacaggaattccccatacagctcttatcacagccatgttttttgtctttcgaatcttttttactgcaacaatcttttgcagcggattcttttttgcaacatgacatttctttttttgttccatgcgcatacgtaaacgttggtcccatcaggaaaccaatcgtaacgaatagcaatatgtaaaacttctttgtcatagttgctcgcaaagatatttttatttaccggcttagcttgttaatttttttgtaaatattttagaaatgattcaggagcgttagaaatttatctgtctcttaaaaatggtggcgtaaaacgtatatcaattggatccgtttttttactataagaagtatagacatattctgtggccgtcaaagatattacagcataacggaatctttatgtaaaaaatactttgatgtaccaaattaaagaactatcatgtgttgcaaatcatacagttggggggcttgtatgaaattacaatgtatgaattagatctgaaaatcagcggaaaaatccaactggtacatcaaagtttgaaaaaaaggactcgtttaaaatatcaatctcactttattgaagattgatatttatagtacgtccgtctttgataactttcttaacgattatttttttgccttcagagaccgttatttttagttttttatccactctttctactgtgatatcaaaatcatgttcaaatgcattgatgtgacgcattttcatcatgggccaggatttaggaagacgtggagtgaagtcaaacgagtttagcgctgtaggtcggatgccaaataaaccttcagtgataattcggcaatacaatccgctttctgctgaaagatgacgctgatcaccttcgggataggcttctacagggtagggaacatgatctcctaataaacgacggttggaatagtagtgcagaaaatccagtgctttgtctgtttcaccagcggcgagaacacctcttagagcatacaaagtcgatcggtcccagaaaattttatcacccgcaatactggcaagaccgtctttggtccataacctgggtgagaataaggcttcaattgttccttcttttcgatcgtaaatacccatcgtgagcggggtacagatccaggctcttagaatatcattttctgtgtagtatttgtaggtttcaaagccttcgactttagctccgaaatatttctcaatagctgtctttaatttttcagcttctgctttataggttttaagttgtgtttcgttttttcctaaagctttacccagataaacagcagaattcaaagcatcataatataaagaagaggtatttaaattggcttttccggcaggaagacggccttcgagttcatcagaatcggatgttacgatgccatcagaatttaattttctatggcaatactccagacaccattcgatcaagggccataattgtttggcttcatttgtatttcctctcgaaagcgcataacgcgaagctccgtaagcaatcatagcaccatcgccacgatcaccggctccggcccaaatatcagttccttcggctacaatcgaactcgggattggttggtattctttgttcataaattttgcaaattgtaaataagcatttaaggaggcctgattaccatactcatatcctaaaaaaggaaaaaatgggccaatatattcggcctgatcattggcccagatagcagcataataagattctcctccggggccgtgcataggaccgcctttggtttcaaaaatactttcggaagctctgattttagcaaaagcaaattccgtattcaaaacgggatccggcgtttctaagataagtttactccatatttgatgaatgagttgagtacgtttttctttttcttcttcggcatttacaacaggaacctgctcgtttgctttgacacccgaatagaaaacagaaaaactaacggcttcattggttttaagattaaaactcccggaattagagaggtcaacatgcaaagtataactaccttccgttcctttttcgggatctgtggtataaacggtattcgattttggaatttctacgatacaggttttctcagttatgtttttaagagtataaatttcacaataaccggctacagtggtcgacgggaaaaattgccgggtcaattccagtgtattgccggctttactcttaacgagtaatgttccgttcagcgttagtgaagtcactttttctgccacgataggtttgtagtttacggtgaccaaattaaaaccgtcttgtgcaaaccttcgtgttaaactggcatgagtattattagggatggttctgagcatgggccagaccatactgcgggtcgcatggaacgaaccatccgccgcaacgccataccttagaacgcaggagatttttttaccactcatttcaatatgatcgtcatgcggaatgttgttgttgatctgccaggaaatagtaccgtcctgattgatgagccagcgtcggtcttcctgcgaaaatgctttgcctgctacgaagcaaaaagcgacaaggacgaatagaatgtgtttttgttttttctcaaagaatctcttcattagaattgtttttttatagatgttgaataattaccgccagcagcttgttatttatcgtattagtagtatttgtttgtgttgttctttagataaattttttattggttttgttttaaagacgcagttgctttttgtcctgaattaacaactgttcggtaattttcgatgtcatcttttttctacgggcggtaattttcattattataggagtatagttttatagctattgttcaacccaaaagtataaatgttctattctttaagagaacagttcctaccggtttttttgaggatgcttagaaagtagagaccaacagaaaaagtaaagtgggtaatataggattaggtagtagaaagttaagattggtttgctatgaaggttttttacgttttgcgaaaataaaaaccaatcggattgttcaacagtgaggaaaaaagatgaggttgcctacagtacaaaaaggaccggaaatagtaaagttaaaagattaaaaatactgttgttatgaggttcttttcagggcttgaaaaatccgctttttgagataggagaaatataggttttgcttcgaagaatatcaaatgatatttcattagattttttactttattaatagtaatggtgttttatagaataaaaacagggtaatatagtattataattataggtataatcttgtttaagaaaaatgctttttggtatagatcagaacaaactggtaggtaccggtgtgtacggatgcttgattgttatacttttgaaattcattttagattaaacgaataaaataaagaataccacaaaccaaccatttactattatcgaaccctttttatgaaaaaaatactatttctattactccttacatttctgttttgtgaagctaatgcgcaggaggaacaaattcagatggagactcaaaatactgctttgattttaaaggtaggaaagaatggcttgctgtaccaatcttatttagggacgaaactaagagataattcaggatacaatgcggtttcgaaagagaataccaaaacatttgtggttaacgatggaaatccattggttaatttaaggcatcaggcttacccgacttttggaacagagaatttgtttgaacccgcaattcgaatgactcacaatgacggtaatccctctctggaattaaactatgtaagccatagtacacaaaaattagatgccaacacgaccgaaacgattatcaaacttaaagatcctgtatatccggtagaagttacactgcattataaggctttttataacgagaatacaatagaacaatggactgaaattatacaccatgaaaagaaaccggttatgttgtacaattatgcgtcatcgatgctgcattttgatgccgatcattattggctgactcaatttcacggagactgggccaaagaggctcgcatgcaggaaagtgagttaacgagtggtaccaaagtaattgactcaaaattaggggttcgtacggatatgtatcaaacaccggttttttttctgtctttaaatgctaaagccaatgagaattcgggtgaacttgtggcaggaacgattgcctggtccggaaattttaagcttgcttttgaattggacaataaaaattcgcttcgaatcagctccggaatcaatccgtttgcttctgagtataatcttcagcctggaaaagtatttacaacaccttcttttatttatactttttcgaataaagggaagggacaggcgagtagaaacctgcattcatgggccaaaaaatacggaataaaagatggagaaaaatctcgtctgaccttattgaacaactgggaaacaaccttcttcaattttgatgaaaaaaaattgaccgatatgtttgcggattccaaaacgttgggcgttgacatgttcttgctggatgatggctggtttggaaataaatatccaagaagcggcgataaatcaggacttggagattggcaggctactaaaacaaagctgccaaatggtattggtttccttatgcaggaggctgaaaaaacgggagtaaagttcggaatttggatcgaacccgaaatggtaaatccgaaaagtgaattgtacgagaaacatccggattgggtattaaaattgcccaaccgaccggaaagttattaccgcacccaattggttttagatttatgtaatccgcaagtgcaggatttcgtattccaaacagtagacgatattatgcagacaaaacaaggggtagctttctttaaatgggattgtaaccgaatgatgactaatgcttattcggcttatctgaaaaatcagcaatcacatttgtttattgaatacaccagaggtttgtataaagttttggaccgcattaaaacgaaatatccaaatttacccatgatgctttgtgccggaggaggaggcagaaccgattacggattacttcaatattttacagagttttgggcaagcgacaataccgatcctttcaacagagtattcatacaatggggatattcgcagttttttcccgccttctcaatttgtaaccatgtaacttcttggggaaatcagtccatcaaattcaagactgatgtggcgatgatgggtaaattaggttttgatattaatgtaaaagagctgaaagaaaaagaattgaaatattgccaggaagccgtggccaattataaacgattgagtccggtaatttggcatggcgacctgtaccgaatggtctctccttatgaggaaagccgtgccgtattaatgtatgtgaacgagtcaaaaagcaaagcggttttgttctcctacacacttcatccactttatgatccgcagtacaatccggttcgttttcaaggattagatccaaataaaacctataaagtggaagaaataaacctaatgcccgaggcaaagaaatcagtcgaagaatccggagaatcttttacgggagattatttaatgaatgttggtttacgggtttcttcgtctaaggtcgaaaccagcgtcgttctcgaaattactgaattgtagttaaattagttttttgtatagacgaaaagcctttcgatgggaaaatctccatttcgaagggcttttttattttgataatgaagcagaaaggaaatagtttcaaatgaataattataaccagttggctgtttggaaaagtaattgccacagattagtggattaaaaagattagaaaattagaaaatctgcaaaaaaaaatacacctaggaacatagatttctatgtacaaaaaaaatgatattagaaggaaacaaattttcttcacataaacgatgtgttaagtgatctttttaataactgcacccaaaaggttaatgatttacaggtgaagagcgttagattatctgaaaacagtttaaaaaaccgcaatctttccggtttgtaccccgccggaacttgttactattttatagagataaattccagagggcgtatttttcaaattgatactattgattttagaaagaaacgaagaagtaacaatgttttgcccgctaacattgtagagataaaaagtagcagcttcctcttttttggcttcaatatttaattcttcatttttgcttagtagtgttgggtaaatcaaaaacaaatcatcacctaaatagttagcatcaataatttgggaacttatggtagtattgcttcctaatagtatattgattttatatttattattgccttttattggagttgtatccagaaaagaaaaagcttttgattggatgtcgtttagagtactaatcacattttcggctgagttattaatcttgactaaatctattcttttgatgttgtacaagctaaaaacattggcactgacctttatttgatcctcctcgaaaacttctgctgaagccaattcaaagtagcaatttgagttttgatcatactgtaaagtcgattcgctttttattccttcgctatcatttatcacaggagtaaccgtataaatttttgcgtcagtatagacataattgttgttcgttatttgttctttaaactctaaacggtcatttgtcagttgataaattttaaacgaagcaacatcagcaggtttgtcccaattaatttctgttgtgccatcgcatactaaactggttctaatgtttaaatcataagaaaccgtaaagggatccgaaacataatccgtattaccaatggtcatttttagttttgctttcgagaattttttctctgtgggggtgtatttaaattgttcactatctaaattgatactatttgctataatttcccaggtttgcccattatcatagctaattgacaattgcccattaacaccagaaaaggaagagctccatttgaaaggagaaattattttaccatcataagggaaattatcattagccactggataattccattcaaaaccatttttcgtttcatattcataggcgatactgtaatcctgagaagcatttgagacgtacgtgccagtaacagtaatagtataggtgccggatgtagggttttcaatcgatacctgttcgatagtattcagtttgtcttttcctttagtggcaggttgctgaggagtttcaggattcagaacccagggtaaaaaagtagtaggatcggccgaaataacttcgagatctaaatcgtttaccagacttatagtactgttgatagctgcgggtaagtcgttccagactaaggttatttttaagttttttgcattagaaggaactgtaatagtatgtgagttcgtttgaccggaagccaatttatcggttataaatctgttttcactaatcgttttcagacatttatcagcattgatgttgccataaccataggtgaaatcaggacctgggttacccaaatcttttgcactattaattagaatggccttcgttaaggcattagacaaagcagtattatgtatcgttttatactgttgcttcataagagtgataatccctgtggccaatgcagtagaatttgatgtgccctgcgagctgtaagcgactaactccggttttattctgccatcataagcaggacccttcgacgaaaaagacaggatgacctcgttttgatcgacgcagccaaaggcaatactgtttttagattgtttgaaattgccggtaatagatttatagccttccaatcctttattaccagaggaaaaacaatgagtcaaatcgggatttaatgccaattgattgtcgtaagcatttgcgagtgaaccataaaaattttcaatcactgtaccataagaatgattttgagtggtagccccttgtaaagttgctatttcatcaggatagatattcaaaaagtcagacgattgcagttttgcttttatggctactccttttccaaaaacagaactatttcccaatccggaaactatagtggccatagcagttgcgtggctggatacggtagaagattgtgttgaggaaggaatatgtttatggaagagatcaacatcttttagatcaaaaaggtcatccttgatagaggcaatttggttttcgcctgtgagaagagggaaattaataagcgctttatttacagcattaatagtgaaattttgatccgttatttttgattcgctttgaggttgcagtgcttcttgtgaaacagcagtgacgctgctcaaggaaataatcttgtcaagaatcgtttcggaatcactttccaggattacaagacgatcattaagtattttaatagtagaaatgttcgccagtttcaaatcagcaagtaatgattcaatagcattagtggctatgatgtattttttgtgttcttgatgatttgaaaaatctgaaggcaatttccacaaattattaacgggaactacctctttcaacgatcgattgtattttgaacttttattttcaacaatacaataggtagcgtctaatttttttacaatagtatactgattgcgatgtgcattttctataggggtaagagagtatttttcaaatgttccatcactttctttctttaagtattgttcccattttttggagttttgcgacaaacagattgtcgttgctataaaaaggaaaaacgtaatttttatcttcatttactgtaggtgttagggcaattgtgaacattttgatcgatattttaacaaaagcggacttttttagcggtgtattgtttttttgtttaagataaaatattttttaaatacttctaattgaattgaatatcgtcgctaaaaaatcaaagttatcaaaatatttgtaaaaattttattcctttttatttcgttcgaaatacgtgattttagaaggctatgtccacttttaagagctttcagttgtatttcaaagctgttgaaagtttatcagattcgttttcacccgcgaagtatacgaaatctaaaattaataattttgtaggttttgttttggagtaaggtgttgatttgtaatcgattgcttgtttttattgggctcatagtgaattttatgcgattaccgcataaaaaataagaaaataatttaacaaaatacatttaatttgttaaattattgtttttataagtattttaatactaaatctatgtagttttgacaataaagtagtaatattttgtaaagaccctaaaaatcaacttatttaactaaccaaaacacttttaaatgaaaacaattaaaacaaccttacttttgtcgtgtatagcgctatcgctattgtcttgtaataaagaggatgaggtaactcagccaagtaaagaagctctaacagtatcacaagatgtgttagataaaattagctcacttgcattgaacaacaaagatgttcaagtaattaaaaataccaaattagacggtaccactgaagatgcttacctggttgaaggtgatatcatcatcactgatgcacaattgaaacaaatggatcttcacggaggtatcacaacggagcaataccgcactactaatttagtagctgctccaaaaactattaaaattgtcggattaaccggaacaggtacgacagctttatctgctaatatgcaagccggattacgtgcagcagtgaacagatataatagcttaggattgacgattaactttacactaactttcggttcaagtactacaggtgcaaacatagtagtaagaagacaatccggaggtgctggtggagtagccggtttccctactggaggaaatccttttaactctgttacattgtattctggattagatacttattcagtaaatgtaaacgcacacgtagcagcgcacgaaattggtcactgtattggtttacgtcatacagactattttagccgtcaaagctgtggacaaaattcaaacgaaggagctgctggtgttggagcaattcatatcccaggaactcctacaggatacgattcgacttcatacatgagagcatgtttcagctcaaatgaaacaggagctttcaatgctaacgacgttacagctctgaattatctatattagaagttgaattagaggcgtcctttgcaaaatattcgaggctgttccgtaattggagcagcctcactttatttttactaactgcttaaacttttttatgttggatgggagtattgaatcccctgtatccttcctgacttttttggataatttaaaaataaaacaggtaattctacgtagctgtaagactatattttgtactagatttattacttaaaccctaataagcgacaaatcatgcaaaacaatgaaaattcacccattccaataggatgggttggtggatttccaccagcaggttcacctatgttgtatccaacccgggatctttcctcattaccgatgttaagtaatatggataacattagttttttacaacgtcaacttggtgtaagatggcctgagtttagttgggaaacccaaaaagacagtcctaacaagagaagatgttaccaacaatttgcgccttacatttccagagcgggttatactgatgaaggtcgggtatattcagttatctgtcctcaacagggagtctggcttaaagatgaaatttgtatcaatgttgaggttacggttaccggacaaagaggttgggtgaacgaagtaacaaaagaggttgccatagacatgaccgttgaaggtaaaatttggctgacaccaaatgaacaacaaggcgataagatcaaagagatttggccgctattggaatatagttttccaaaatttccattgaataaagataatgcaataagagtcactacacacaagcagaatgatcctgatcagcccatctttgaagtgatacacggattaaatcctgaatttgaaaatcctccgtttgcattacatgagggtaaagcatttgctacggcctatcttgccgttgaaattggagatattaagctgacaaaagataaagtagttgatgattttaatcaattaattatgaaagcttttaacattggttcaggaaatatgcttcagccgggaaataccttgtcatggaacctttggttcacagaacccgctttggtcaataaggaggagtggaaaaatcatgctgaattttggagaaactctattgatgtacatcattgctctcctaccggaaatggtactgatgccagatattttgacggaagcaaatttagccctgaagcaaatgccgtagaggagataattaaggatattatcaactatgttagaaaacatctttaggttattaaaaaaaatgacctataaaaaaggaaggtatttaatatcttccttttttttgtggagccatcggagttacgattgaacaatctgtacctcattttttaaacgcaagttgttttcttgacggttggcagaatatcaaaaaaatagttttagagaaagcgggatggtattctttatcttatgagttagtaggtaagaattaatccgttgggagtaattaatttttatatttgaggattaaatgaataaaatgagcgaaaaaattaaaccgtatgccttagtaaccggtgccagcaaaggtattggaaaatcgattgtttatgaattggctaaacaaggttatccgctattgctagtggcaagaggagaagacgaattaaaagcactgtctgaggatcttcaggtgaaatacggtatcaacgctccaattttggtaattgatctttcattggctggtgcatcgctaacagttaccgattgggtaaaaatgaataattatccggttggtgttttagttaacaatgccggttatggcgtgtggggcaattttagtgagtcttcactgaccgatcagcttggcatgatgcagcttaacatgaatgtaattgtagaactatcacatttattagtacctatactttcacaggaaaaacaagcctacattttaaacatatcgagtactgctgcttaccaggccgtacctacgctggccgtttattccgctacaaaggcttttgttttatcgtttacccgtgccttgcgtttcgaacttgtcaaaacttcaatttcagtaacttgttttagtccgggtccggttgataccggttttgctgcaagagccggtttgaatccttttaacaaaatggctgaaaagtttaatatgcaaccggatgaagttgcaaaaattgccgtaaaagccatgttcagcaaaaaatcagaagttattccgggttttacaaatatcatttcggtgtacgccaaccgcttgctgccaaagggatttatcgaaaaaacggccgccggaatttataaaatttaattttttttcaaaaaaaagtaagaaaatatgctttgcaaaagataaattattattatcttcgttttaatatctactaattctatagagtatgtctaataaaagaaatatgtttagttttccgaaagaacgaatgcaagtaaacaacatgcgaatgtgtcgctgttgttgctgtcgctaatcttttagataaaattacaaacactattatttcatttattaaatatatttattatggtatcttcttataaaacttttacccttactgagcaattaacagatgagcaaattgactttttcaacgaatatggctttatccatttcaaaaaatttataaatccggaaacggtttcatcaatcattgatgcctcaaaacaagtacagcaaaaatggattgacaatgagcttaaaaaggtaaatggcgttccaattaaatacggaaaagatttagatggttctcctattgtgcagcgttttgcttttatcaatcagcatcaccaaaccttaagcggtcttttattggatccaagatttgatagtttattgcaattggcaggcgagggtgcaagattaggcactgaagaaaaagacggaatggtttttaatcattatatcaatgggccggaaagtaagtttactaaaatgggctggcatacagatggtttgagagatattttttatggtgcaaaattaaacccgatgttaaatgtggggattcacttaagtactttgaaacccgaaaatggaggtcttaaaatcattccgggcactcacaagcaaagtatttaccaaatgctttttcgtaaaaaatactttttagatcataatgccgattcagaggaagtttccatcattccggaggcaggagatttaaccattcacgatggtcgtttgtggcacagagtggcagaatcaactatccgtggcgaagagagtagaaggagagttatttatgttccaataatagcaggaaaatacgctccgaaaaacgagaatagcccaacggttttttatcaacgttttgcgggaattgttaagtaatatgctgtttgtcctcgcatttagttatctggttagatcaggtaagctaaaaaaaactgccgattttttaaaaaatacgccaaggaaaataaagttaaaaatggttaaactggaattagcgatactctcaggcttacaaatattgcgttattaatgggaaaaaaaacacaagttgaagagtatagtgcaattgtacaaagagcattttcagaccgtaagcggactaatattttaaaaagagcagaacagttaacgattgtgtttttacttccgaaggtacctgaattcatttcaccaaacgtactcactttaattggttcacttggttccggattgatttttttagcctttgttttaggggcttacgtcaccgattggtatttgcttttggctattattgggttgattataaattggttaggtgattctttagacggaagattggcttattatagaaatattccacgccgttggtacggttttgcactcgatattattgccgattggattggtattgtacttataggttttggctactacatttatgctaaaaatggtacacaaatagtagcctttgcttttgtggcattgtatggctggtctatcatcatcagtcagttacgttacaaaattacaaatgaatacagtatcgattccggttttgttggtccaactgagcttcgatttattattgctttaattttaattatagaaattttatttcatggatcaatcacctatttggcgggcttgataactattgtattgtttgtaattaatacgatagatagtgtaaggcttttaaaactgggtgatttaagagataaaaaccaggaccgatatgttcagtaaaaaagctgtttttacttttctgcaagcacaagttgcggcatttttaggcggtattaccgattatggtctgatgattttattaacagaagtatttcaagtgcattttgccttttctattctaatttccgggaccgttggtgcagttattaatttcagcatcaatagaatctgggtgtttaaaaatcaatcgggttatagcagccacatcaacagccagctttttaaatttgccttagtggtactagggagcatttccttaaaatcatttgggacccttatttttcagaaagtatttcaaatcgattatagaattggaagattaatcacagatagttttgtctcttatggatttaattacccactgattaaatattgggtttttagagcaaacaaaaaacagaacgtagtcgaatcaaattaatagagaaatagccagttggttgtaattcatattttttctatgtgttgaaaaaatagccacagattaacagaatggagagatttgaaaatctgcaaaatctgcgtgaaaaatattaaacagatagtcccgatgcatcgggatatgtgtaatagaagaagataaaaagaaactagtttcacacataaccatctatgtttcttttaaacaagtgaagcgccttttttaagcgtcctaactctatgtttctagcctgtactgagcggagtcgaagtgtgttaaaataaaagaaatcaataggttatataaaatttagtttatgaacaaattatcctttaaagattttacaaaatcactgatcgttatagcgatcttagtacctataatttcaggaaatctattggcacaatccaaaaatccatcgccattaaatttcccaacgcctaagaatgtagataatatgctattctatattcagcgagatcccaatataaacacggctatttatgccataaactaccaggaaaatggaaaaataaacaaaagcaatcctataaaagcgtattggattcgatatgctgagaaaggagaaaaaaaagatttcaattatttacaacgcaaatttgcctacggaatagaaactaaaactctcgaaaatgaggagtttgagtttaaatttgtgtcatataaaaaattggccttaaccttgaaaaagatagaggtggatcaaaaataccatgtttttgcaaatgtaaaccagaaaaaaatacaggtagaaaaaatatttgtgcgcattgaaggaggttctttttggctacccaatgtaaagtatgccgaagtgaccggaattgaggcgctctccaataaaaccattaccgaaaggatgttgttaaaataagatattcttattctttcatgtgttctcctaaaaagctgtgcaaatgtctctgactttgcgcttttttgttccttagaaattataaacgggataaaagtctccccaccttttacgtttagttcttatttattgtcgtggatttttttacattcagggaagtattctaagaaagttgtttttaaagcaagagactttatgaagtttctgtttttcaattatatttgtttaaaatggcgcaaagtcagagatatttgcgcaacgtaaagaaaaatacttcgtagagtggaatatctacaagaacaaggagaaatcgttacaataggagattttagtatttcctatgaaattgatttagagcaagtgtttgattattttaatgtaatcaataaatctgcatttgcagaacactatgcagaaataaatcaaagcttattccgacaatataccaaaggattagctccattatctagtgaaaaaatggaattaatatctaaagggttacacagattagctgatgaacttagtgatttaactttggtataaagtttgacaagactagacaatgtttctagaacttttttattacaataaaacccctcaatagaggggttttttattttttaatcaagctcaagaaattgatgttccctttgaaaacattattgataataaagaaaattctaataccttcgaagaggtaaaaaaaatgattaaacccaaataaactatgataaatcgttataaagtttcaactaatatttcttcattgcaatattttgtagtagttgttcttctatttttagcaattcttgcctcctttaaggggtataagattttaagttttattttttcactatttttcttttataaagcgtataagatttatttaaaaaataaatataaaatcgcagaattagaaattgatgaaaatatgattagactatttaattatgaaaacagattggtttttcaagctcaaaaagagcttttatcatttacggaacttgaaaacggattgataaaaattcaatccagacaaaaagagatctatcatttggatctaggtaccagtaaaaatgagataaaaatgttaataggagaacatttgtttgaaaaatcaaagaaaagctctttttttaatttaggcaatatcttagattttttagatattatacgatgagtagactgcacttactactgttgttttgttttttcttccatttcttaaatgcacaaacatatgacaaaaagggtcataagtagggatattggcgagtgtttgataatgaaaccaaacaattaatatttgaaggtgaatataatcatggtgataaaaaaggaaggtttataacatattatacaaatgataagattaaagacgtaaactttttcaagaaaaatttattacatggattgcaaaaaagatttgtccagttctccaaagtgttctcatgtaatgttgcgcaaatgtctctgactttgcgttcttttttgttccttagaaattataaacgggataaaagtctcccgactttttacgttaagttcttgtttattggtctcagattcgggtttaaaaccctgcaatttattgcagtactttagtaatgcgaaaaaatctatatcttctcttaactcttaactcatcactcatcactcttcactcttcactcttaactcttaactcttcactcataactaatcacaaataacacataacacaaaaaacaaaaaaaataacaataaaagcgttaaaatacgcttaatttattaactaaaacgtaaaataaagttgttaataaatcattgaaataagtgtaggtaaatagctgaaaaaatttcaaaaaaacgtatcttggcacgctttgaaactaatataattatttaatataacaacttatgtctgaaggagaaaagttaattcctattaacatagaagatgaaatgaaatcagcttacatcgattattcgatgtcagtaattgtatcgagagcgcttccagatgttagagatggcttgaaaccagtgcatcgaagagttctttacggaatgtatgacttaggagtaacatcaagatctgcccacaaaaaatctgcaagaatcgtaggagaggttctgggtaagtatcacccgcacggagatacctctgtatatgatgcgatggtacgtatggctcaggaatggagtatgcgatatttattagtggatggtcagggtaactttggttctgttgatggtgatagccctgcagcaatgcgttatacagaggccagaatgcgcaaaatctctgaagatattatggcggatatcgaaaaagaaacagttgactttcaattgaactttgacgataccttatacgaaccaaaagtaatgcctaccagagttccaactttattagtaaacggagctacaggtattgcggtgggtatggcaactaatatgccaccacacaatttaactgaagtaatcaacggtaccttagcgtatcttgataataatgatattgaagttgacgaattaatgacgcatattaaagctccggattttccaaccggtggtgtaatatatggttatgaaggagttcgtgaggcttttaaaaccggtagaggacgtattgtcatgcgtgctaaagttggttttgaagaagtagacggaagagaatgtattatcgttaccgagattccatatcaggtaaataaagccgaaatgatcaagcgtacagctgatttggttaacgataaaaaaattgaaggtattgccaatattcgtgacgagtcggatagaaatggtatgcgtatcgtttatatcttaaaacgtgatgctacaccaaacgtagtattaaataccttatataagtatacatcactacaatcttctttcagtgtaaacaatattgcattggtaaaaggtcgcccacagatgttgaatctgaaagatatgattcattattttattgagcaccgtcatgatgtagtcgttcgcagaacgaagtttgaattgcgtaaagccgaagagagagcacatattttagaaggtttaattattgcttcggataatattgacgaagtaattgcaatcatcagagggtctaaaaataccgaagaagctcgtgaaaaattaatcgaaagattcaatttgtcagatattcaggcacgcgccattgtagaaatgcgtttgcgtcagttaacaggtctggaacaggataagttaagagctgaatttgaagaattaatgaaattaatcgaacatttgaaagccttattggccgatgtaaatttaagaactaatttaattaaagaagagcttgaagaaattcgtgaaaaatacggagacgatcgtcgttctataatagaatatgctggaggagatgtgagtatcgaagatttaattgccgatgaaaatgtagtcattacgatttcgcacgcaggttatatcaaacgtactaaccttaccgaatataaaacgcagaacagaggaggagttgggcaaaaaagtgccgggacaagagatcaggatttccttgagcacatgttcgtggcaactaaccaccagtatatgatgttctttacgcaaaaaggaaaatgtttctggatgcgcgtttacgaaattccggaaggaagtaaaacggcaaaaggtagagctattcagaacctggtaaacattgaaagtgatgataaagtaaaagctttcatttgtacgcaagacctaaaagataaagattatatcaatagtcataatcttgtgatggtaactaaacaaggccaggtgaagaaaacttctttagaaaaatattctaaaccaagggtgaatggtgttgctgccattacgattaaagaaggagatgaattactggaagcaaaattaaccaacggagacagccaaattattttggcagtgaaatcaggtaaactggttcgttttgaggaaaccaaaacacgtccgatgggaagaacggcttcgggagttcgtggaattactttaaaagacgataccgatgaagtaattggtatggtaactatcgatagagaaaatgttaacgattcacaaattttggttgtaactgaaaatggatacggaaaacgtaccaaattagtagacgatgatggtgaagatgtgtacagaattaccaatcgtggtggtaaaggagttaaaactcttaatatcaccgataaaaccggtaagttgatctctatcaatgctgtaacggatgcggatgatttaatgattatcaataagtccggattaacgatcagaatggctattgaagatttacgtgtaatgggtcgtgcaacgcaaggagttcgattgattaacttaaaaggtaaagattctattgctgctgtaacaaaagtgatgaaagatgatgttgctgaagttgttgtagacgaagacggtaatgttattgaatcggttattgaaagagtaaaaccggatttagaagttcttgaagacgaaggtgttgttgaagatgaggatgacgaggatgacaatacagaagaagaatctgaagaagaaggcgattctgatgacgaagaatctgaagaataatagaaaataaaccacttaaaattaaatacacaaattgaatattatgaaaagtaaatatgtaatacttgcgtcagcattattgatttcagtagctacttttgctcaaaaggatcagataaagagtgctgaaaaagcattaaaaagcggagatgctcagggagcactgacgatattaaaagatgctgaaaatatggtagtaaatgccaaagatgttgaacaagcgcaatactattttgtaaaaggtaacgcttatttagatttagcaaataaaaaagtagaagaagggaaaaatctttctttggctgctgagacttatcagaaactaattgatactgaaaaaacttcaggaaaggttaaattctctactcaggcggcggcttctattactgaaattaaaggaaagctgatcaatgctgctattgctgattctcaagcaagcaaacatgctgatggagctaagaagttgtatgacgcttatttgttggacaaaaaagatacaatcaatttatactatgcagcttctactgcagtaaatgctcaggattttgaccttgctttaccaatgtacgaagagttaaaaaaattaaattattcaggaaaaggaacaagttttacagctgtaaataaaatttctggtaatgaagatggttttaacaatgctaaagatagagatttagctgtaaaattaggaactcacgaaaagcctaaaacagaagctatcccttctaaaagaggtgaaatctacaaaaatttggctttaattttagttcaaaaaggacgtagtgaagatgctaaaaaagcgattgcggatgcaagaaaagcaaatccggaagattcttctttgatcttaacagaagcgaacctttatcttgagtctaaagactatgacacctacaaaaaattagtgggagaggctttgcagaaagacccaaacaatgctgatttagttttcaatttaggagtaattagtgctaacgcaaaaaacactgcagatgctgagaaatattacttaaaagcaatcgaaatcaatccaagctatgcaaatgcttatcttaaccttgcagcattaaaattagaagctgaaaaaccaatcattgatgaaatgaataaattggggactactgctaaagatatgaagcgttatgatgtattgaaagcacaaagagagaatgtttttagaggagttattccttatcttaaaaaagcaaatgagctagatcctaaaaacgaagatgtttctaaaacgttattaggtgtttataaagcgttagaaatgactgctgaagcaaaagcattgaaagctaaaatgtaattaacgagagttagtactcaaaagtttaaaattccaaattccaatgatgcccttgcattgttggagtttggaattttttcattaggatacatgaaagtcaatatttttaaaatccaaattccaatggtacttgaaattattggaatttggatttttaaatttggaattttcttaagcgattagtgtagcagacaatgtaatggtagtatttaaaagtttagaaatcgggcagatttcttttgcttttgttgctgttttttcaaattcctctgctgaaatggatggtacttttccttttaagtctaaatggattaaggtgatagagccgtcttcaaaggttactgtggcttctgtggttagatcatcggctgtgtagccaccttcgtttagcaaaaagcttaattgcatcgtaaaacagccggaatgagctgcagcaataagttcttcgggatttgttccaactccatctgcaaatctggttttaaacgatagttgtgcattgtctaaagttgtactttgagtgctgatggttccttttccttccatacctgttcctttccagttggcatgtgcttttcttgtaaatttcatcgtgttgtgatttgaattaataatttatttggtattttgttgactgtcagtaaataatgtgtttatcaaatataatcaatattttacggaattgttttatgaagtttaattgtagtgttaagtttaggtactttggttgagaaaggtttttaaccgcaaagggcgcaaggattttttacgggttatgtctgtataatgtaaagcctgtggttggactcttcggattttgcctgactttggggttactaatgcggatgtagttattaagtccctacgggacagatgtataaaggggggtgtaattaccgatatgtaatctctacgagattttttatgcttctattttagtaaagtaaaataaagtgtttggtgattatggttctttcaggtaaaagtgcttctttaggagcttaatattggtaaggaagcccaggtgttaatggggaatgtcccgtaggtactacatgttggtttcgttcaggcagtttgtgttaagctgtttttacagataaggttaaaagcttttggagtacaaaaaaaaggtgtaatgaagactctcattacacctttgtatatattatcggagtttagatctagaccttattcctgatttaagttacgcaattgctttagtttttctttccaaacttctaagctttccttgtggattgcgatgtttttgcgaacctcaagaacaattgagttttcttttttagcatttttggtattggtaaagaactgaatgttattctccaattggaaaatttcgttctgtacttcttcaatcttacgcattaagaagatcttctcattgtctaatttacgagtgtcgttactgtcggataacgaatcgattcgattggagaaacgcatcatttcggtttcttttttgctcagacttagtttttcgaaaagtgcatctaagattttattgaatttcccttcaatatgacgtcttgcgaaaggtacttttccgtagcctttccaaatctcgatatgtgctttgatggcatccagatctgttttatgatcacctgttaactggtaagctcttaagatgtccagataagcttttttgttatcgaaagcggctacttcatcaacgttttcctctgatttatgctcttttaatttatcaaaatagtgattgcaggcatctttaaattctttccagattttatcggaatattttttagggacgtgaccaatttgtttccactcttcctgaatttgcttcatgattggagtagtggcggtaaaatcagtactttcctgtagttctttagcctttgctactagagccatttttttgtttaaattgtcattttgatccttcttaatgtctttgtaaaatgaatttttaaaagcattaaaatttctaacagcagttttaaacgcagcccaggtttcttcattcacttccgaaggtactttaccagcagcaaaaaactcatttctaagcgcttctactttctgaatctgtaccagccattgagagtgagagtttactttctcggttcctaaaacttcaattttggcaatgatctcttttttaatttcaagattattttgttcgtttgctctttggctttcgaacaaaacttctcttttgtcgtgaatttttttagtcagttcactaaatctgttccagatcgtatcgcggtgttctttagaaaccggtccgatatcttctttccagattctgtgtagatcttgtaattcacggaatgccttgctgatgtcggtttcatcaaccaattcttcaacacgggcaactattttttgtttttgttccagattgtgtttgaaatccaaatctctcgcctcacgatctaaatgcaggtaatcgtaaaaattctctacatgaaaatggtaattgttccaaacgtgattgtatttgtctttcggaattgcacctgcattcttccatctttctcttaaatcattaaaatgtttaagcgtatccttgatgttctcctgaggattgatgagctctttaagctcttcaacgatggcaagtctgttgtctaaatttgatttaagattagtttgtaaatgtttaaaatgaacatttcttttttctctaaaaacattataatactcgtcaaatttagattttaaaggagagtggtattcgaattcttcattcggatcttgtttggaagcattgaattcttcttttttctcttctataaagtgattgtattgtaataaaaacgacttcttgatttcttcgatgtgatctttcacagacattactttgtctgtattgatcagtttttttagttcatcaacaagtgcatccaaagaaaaagtatcataatcctgcataggaatttcatgacgctctttaagcgtctcatcttcactttcttcggcattcgaattggttatggcatctaatgcagtctgatgattggcttcggtagtttcaacagtactttctgattcaatctcatcattcgaaattgtattttcggttactgcatcggtatcagccgtttcgattgcattattctcagtagaatcgttaatgtcgatttctaattttccgtctgcttcttgcaggttatcattcttttcttctaacatttttaatgtataaggtttttattttaaagagagcgaaagatagtaaaggtgtttctaactacaaaataaatcgtttgtttatacgttattttacagtgaaattcttaattattgctttaatttaaagatatgataggggcttttttggagatttcttgaagttaatttaaattatgaattgctggaatttttagaaattcaaatgtaaaatgatatcggaaggcatttttgttcgttttattttgatttgaaacagagaaatggagtgggtaattgtataaaatagttaacccgacaggttttgaaacttgtcgggttaaaatatttaaagtaatgttctgttgtagtctttttacttattccagattttccatgccttttcagcctgaaaaataagcatgtcgtaaccattttttattacagcacctttttctttggctctctttaaaaattccgtttctgccggattgtaaattaggtcgtaggcaatatgtttgtctgtaaagaactcatatggaatatcaggacaagcatcggtgtcaggtattgttccaacaggcgtacagttaatgataatctgaaagttatcaaaagtagtagcgttaattaagttgtaatcgatgatattatctttggcttctcttgaaacaaaagtatagagtatacctaattcatcaagagcaaatgcaactcccttagaagcgcctcctgttcccaaaatcagtgcttttttatgatgaagttcgagcagtggttctaacgattttttaaagccgtagtaatcggtgttgtatccttttaattttccgcttttggtaaattttatagtgtttacggcaccgattaaggttgctttttttgaaagtttatctaagaatggaatgacttgttctttgtacgggatcgtaacatttagacctttcaaatcgggattgttttttactaattctgtgaaatagttaatttcagagatgtcaaaattttcgtagctgttgccagcgaaaacctcatcactgaatttttctgtaaaatatccttttgaaaaagagtaactaatattacggcccaacaagccaaaacgtcttcttaaagtatcaatcattattgttttctgtgtttttcaatgtaatttttaactgttttctttgaccagactaccgggaataaatcttcgattagaatgtaattctcaaagtttaagcgtaaaccattgcttaagtgaaatttagctttagtagtgtcctgagtcataaaatacaatccggccaatcggtattcgatttcgttttcttccggaaaatattcggttgcctgtaataaagtttgaattgcactgtcgaattctcctaagaactgaaggatgtcaacccagaataaccaggtatccagcgcataatctccaaattctactgcttttctgtatccaaattcagcctcttcaaaaaagttcatttgtttgttgatggtagcgtaacgcttccagtacaaacgattctgattgtcgatcgctaatgctttattaacaaagaacagggctttttgaaaatttttctggcgcatatgaaagtcagtaatggcaatccatcctttgtctaaaagcggatcttcatgtactgtctgattgtaatattgcaaggcttttaccaaatttcctagtttttcgtagcattttccaatgcgtagtaaagcataggaagttgcatcgtctaactcaatggtgcggttgtagctttcgatcgcttcatggtatttttttaaacgctcgtaggcttttgctttttccataaaggcaccaaggaactcatcgtcgataagtgtggcataatcaaaagcacgaatagcgttttcgtattcttttaccccataatgcaaacgcccaagctgatgccaggcaatttcgctgtatggatttttgttgatgtaatcgtttagataaacaatggcttcctgattttgatctaaaaattcaaaacaatacaccacattataaagcgcagactgatcttctaaatcttcttcaagacatttgatgaagctgtcttttgccatctcaaggttatccataaaaagatattccattccaatcaagttgtaaacgtccgcgtagtcatctgtaaattgcagggcaattttaagtaattctaccgctttttcgtgttgatctcttttagaacagatattcgctttctgaatgtaaatttcctcgttgttaggttcgattgcatacaactcatttaagagtttctcggcgatttccaatttatcgtcgtaaaccaacatttctacttgtactaattttaagcctgtagattttgggtgttggtctaatgcaagtttcagggccttctttgctaaattagccttacctatgtctaaataatgaagaataatttcttcgaattcttcagaatcaaaaaagagtactttgtttgtttttaacattgactcaaatttggatagggataggttataatcttcttcttcgttgcttaattgcatactgtctttatttgaaattagcctgttataaatttaggcaaccatattattgctgtggggaaaggaaattaattgttttgaacaatttaattaacaatatggacagaattccgattctgtttttagtcctaatcttctgatttatgagaagattagggagttgttattttatctgctgatagggatttcctatcctgatttgttttaattaaacttcttgctcctttttcaggatttcatccataacgtttaagattatggcacaaccttctttgatttcctcttcagaaatggttaaaggaggtgttattcgtatcgcgcatccttcaaacagcaaccagaataaaatgagccctttgtcctgacagttcaaaataacctgattggtaatttcggtagtttcggtcatggcggcaagcattaatccttttcctctaacttcctttatcaaaggatgtaccaaaagcgatcggaagagtttttctttctctaaggtctcttccattagatttgtttcagttaattcctgcaaagtagccagacatgctgacgcaatgacaggatgacctccgaaagtagtgatatgccccaatttaggattttcggttaacagatccattttttctgccgatgctgtaaaagcgcctaccggcattccgccacccataccttttcccataactacaatgtcgggaataacatcataggtttgaaaaccaaatagttttccggttctcccaaaaccaggttggatttcgtcaacgatcatcatagcgccaacttcgtcacagcgttttctgactttttgcagaaaattgtcatgaggttcaataaatccggcaccaccctgaatagtttctaaaagtatagcagcagttctggtcgttatcttttgtaaatcttcttcgttgttaaaggtgatgaaatcaacatcgggaagaagcggtctgaaggcctgtttgcgctcttcaaagcccataacactcatagatcccatagtattgccatgataagcattatgacacgaaataagctgactgcggcctgttgctcgtttggctaacttcagagctccttcaatcgcttctgttcccgagtttaccaggtaagttttgcttagtgattcaggcaggagtgaagccatgagtttgcaatattccacagcaggactttgtgagtattcgccataaaccatcacgtgcgaatacttgtccaattgatctttaatggcctgattgaccctcgggtgctggtgcccaagtgtacaagcagagacacctgctacaaaatctaagtattttttatcgttagtgtcgtaaatgtacgagccaatggcatgtgaaacctccattcccaatgggtatggtgaagtttgtgcctggtattttataaaatctggattcattttttttgaggttctgagtttagtcgcagtttttagtcgcagtcgcagtttttatctactgagaactgagactgaaaactgaaaactattttttagtcttactcttagcgtttgtggtggtcttcactgtgggtttctttttgtcgtaatccaaggtttctttccttacttttagaggtacatttttatctttagcctcttcgtcttttccctcctggattaatttatcgttcatttcattgtcttcggctgtaaagatatcgtctttcgactttattcgttcgtcgccgcgccagcgcaagccttttaatttacgggcgttttcaggtaaatcggcttcgggatatacgtcaccgtcgactttgttgaaaaatgtgatggtttcaatatcgttattttcgataatcagattgattttactgcttacatttttattgattccaattagctcattgtcatcatttcgcatgtagtagattacctcggtgtttttgataacgtcgacatcatgtagttttccttccctgaattttccaaataaattgagtcccttgacctgattatagccggttccgagggtatcccgcgagactataaatgtgttgttgaggacttttaaagagtccagctttttggtgtttttgtcaccaataagatgcatgacatctcctgtgatttggctttctccattccaaagaatcgggttgccaattagttttgtcaaagcagtcttggaattggaatggatagaatcacattttccgctcatgtctattttgtaaaaacgtacattgttgtaagctcttagaattcgttccccttcttttccggtaaccatcagtttttttccgtgaatataaactgaatctttttcaaccagattaatggctacggctcttttggtgacaaacatcgaatctttgagcttgtaaatctcagcataatggccttttacgatgccacgattgatggagtccgtgatttttacatttcgggtggcagaggcaaattcaatatttcgattatagtataaactgtccccttctatgaggcgatcatcatatttgatgtaagatttccgtaaaaaatgtgcaagattcttcttggtgtcataaaaacccctttccgtgtaaatataattggatttactggtaatcgttgaagggccaagtaaataggagtgtcctgaattgctatagtaatctaaatgattggatttgatcacatattttggattggtaatcgtaaccgcagtcaggaattgaaactttttctcggccacaaaataccttcctgatttactaaccaatgtattgtctttgttgatgatagttcctttggtgttgtaaaatacctgctgaatatttcggtcaaagtttattgtatccgtacttaaagttgcatcaggtgaactcatgactgcgtcaccggtcgcaaaagctttttttacattaccactgtattcggcatatttactgtttagaaataaggtgtcaccttgtaccaattgcacatttccaaaagctttaagataattttctttttgaaagaaataagctttattacaggtcagtacaaccccgtcatgattcacttttacatttccggtaagcagtaaagcacccgggatttcgttttcgttgatttcttgaaaatcagcattttcaacaattattgttttaggtttttgagcaaaaagatcttgtatgcttaaaaaaagcaaacaaaaggatatgaaaaatagtaatttcttcaatggattaattttttgtcaaatttatgaaaaaggttataacctttatggatattaagattaatttattaatacggattttttgaatggatggataggttttaatgaaaaattctaaatcaatttgataaaaaaatgttcatttggttttgagtttaatttatcaacaaaacgaagtactcttacgttgtagttgatgattttgtacttctatccaaacaaaaaagatttttaggtttccgtgaatttaaaaattagtctaaatttagaaaatggttttcagaataaggaatgttatttccgatttggagatcaatcagattataaagaaaatatgataaataagaatttttttgttgtgggacttgctgtggttctgctgttttcggcctgtaaaaccaaagatctaaaaatgaatacaagtaaagaagagactcgtaaggatgctaaaattgtggtctatcaggtttttacgcgtttgtttggaaataaaaataccactaataagccgtgggggacgatcgaggaaaatggtgttggaaaatttaatgattttacagacaaagcgctgcaggagattaaggatttaggcgttacccatatttggtatacaggtgttccgcatcatgcattggtgggcgattataaggcgtatggaatttcagatgatgatccggaagtggtaaaaggccgtgcaggatctccgtatgctgtaaaagattattacaatgtaaatcccgatttagcggtgaatccggcaaacagattacaggagtttgaagcgttaatagggcgtacgcacaaagccggactaaagctgattattgatattgtacccaatcatattgcaagaaaatatgaaggtaaaagtaacccggcaggagtaagagattttggagccgatgatgatgtgaatatggaatataaacgggataacaatttttactatatcccaaacaatcattttgaaataccgagtggagatattccgttaaatggagaaaaaaatgcacttgtagacggggtatttaatgaaagccctgcaaaatggactggaaatggttccagaaaagcgaagcctgaccaaaacgactggtatgaaacggtgaaagtaaattatggaattcgtcctgacggatcaaaggattttatggaacttcctgcgggatttgatcaaaaatcgtatcaggaacattttgctttttggcaggacaaagacgttccggattcctggaaaaagttcagatctattgctttgtattggattgaaaaaggagtcgatggttttcgttatgatatggcagagatggttccctatgaattttggagttatatgaattcggcaattaaggtgaaaaatccaaatgcttttttattggcagaagtttacaacccgaaggaatatcgtaattatattcgtttgggaaaaatggactatctctatgataaagtagaaacttacgataagctgaaagatattattcgcggaaaatcactgccagatggattgtcggatattcagaaaggaatggaagatattgagcacaatatgttgcattttttagacaatcatgatgagcagcgattagctagccctgaatttgcaggaactcccgaacgtgggaagcccttaatggtggtttctgcgacaattagtacggctccaactatggtttactttggacaggaagtaggtgaagcagcaaatgagaatgccggttttggaacgcgttccagaacatcgatatttgattatattggagtaccaaatcatcaacgttggatgaatgaagggaagtttgatggcgggcagctttcagattcagaaaagaagctgcgtgatttttataagaaattgctaaatttttgccttaaaagccctgctttaatgggaagttttcaggaaattcaaagtgtaaatcgtcaaaataatagaggttacgacgatttaatttattcgtatgtacgttggtcagagcatcaaaaactgatcatcgtgactaatttttcttcagaaaaaataagtgaatttgatttgaagattccttcggatattatttcaaaatggaacttaagagatggagtttaccatcttaaagatgaattgtatgagaagagtgttgtgcaattaaaagtaaataagggtgaaggagtggttaaagtgaaaataatgccttcggagtcatttatttttgaattaaagtaattgtagacatctacttaaggggctgaaagcctgaaagcatggtgcaacgcactatgagaaaaattaaaagtgattattaccctgaaagggtaaaagcaaatagataaaaaaagctgatacttaaaatgtagtatcagcttttttatgatttatacttttttgacttttttcaaagcttcgatgtaattttcgtttactttttcccagttaatatgctgataaaaagcatcaatataactcccttttctgttttggtaatccagatagtaagcatgttcccaaagatcaattcctaaaataggagttccgggaatcagggcgtttttcattaaaggattgtcctgattgtcagtagttgttatttgaagttttccggctctgtcgacaatcagccaaacccatccggatccgaattgtttggttgcctgacctttgaactggctggttagattgcttaaagaaccaaactctttattgatcgaacctgctaaagtatcttttggagtttgttcttttggtgttagaatattaaaataaagcgtatgattgtagtatccacctgcattttgacgaagcttggcattgctaagatccatttttttaagaatatcttctataggcagattttcaaactccgtatttacaatttctttgttgaaattgttggtataggttaaataatgttttgaataatgtgtttccagagtaagagttcttatggcaggagccaaagcatcataagaaaagggcagttttgtcagttcaaaagaacctgggtctgcttttacatcatttggagatccaatggtgattttttcttcttttgtaggcaaaggaacctctacaacttcggttaacttattgtcattacatgaaaataatagaaagaatgaagccaaaatgctaaaacgaacaatgtttttcttcataatgttagttattttgatgttagtgaattaatgattgcaatatagttttctttggcttcctcagctgtaagatgacttatttgcatccaggcatttgttttgaaagcatttcgtaaatcaaaattatccgattgattgtaaactgctgttccaaaagttgcttgtttgtaataggcatagagtctcaactgcacgtcttgcggcagtgtagcctgagtcatttttaaagcggtctcaacggcctctgaaaaacgagtatctaaatctttttcagtcattaagcttttgtagcgatgatggtttttccaccaattgctttttggtttaatactacattgattggagtacctaaaggtaaaaataaatctactcttgaaccaaattttataaatccggcatctgttccttgaacaacctgcattccttctttagcgtaatttacaattctacgcgccaaagctcctgcaatttgtctgtacaatacctgtccaaaagtttcattttcgattacaaccgttgttctttcgttttcttcgcttgcttttggatgccaggcaactaaaaactttccagggtggtatttactaaatttgatgataccatccatggcataacgcgttacgtgtacattaattggtgacatgaagatagatacctgaagacgtttgtctttaaaaaattctccttcataaacttcttcaataaccacaactttcccgtctacaggagcaagaatgtgatcgctgtttctgattgcgattctttttggatttctaaaaaattgcagaatgataattaatactaataaaccagctagctgaactaatattcttagccaattgatatcaatgaatttttcagcaattaaaagtacagctactgcgaaaacagtacctaacaaaatggatgggcctccttctttatgaaacataatataaaatttgataaaataaaaatataattggtgctacaaatataacactatctagtcgatctagtacgcctccgtgacccggcataatggaaccgctgtcttttactccggcaactcttttgaatttggattcaattaaatccccaatagttccgaagatgctaacgattaaagctataatcatccagataagaatagatttagtgctaaaatctgcttttggctgtatgtatagtttggaaattaaaaatccggcaaaggcagcaaaaactactccgccaaggaaaccttcaattgtttttttaggtgaaatacgttcaaacaatttatgttttcccattgactttccaactaaataggcaaaggtgtcattggtccagattaaaacaaataatccaatgatgatttttggattgtaatccttgataccaaatgaaattttagtgataaaaagaaaagggagtgttacatatccaagtaaataaatgtatttggatgttttgctgatgatttgtgtgtcatcaaataaaaatacaatacattttacggatacaattaaggtaatgataagcagtgccgaaaaaagcttttcggtatccacagtaattataatattctctttaaatgttttactgatatagttttcagtttccgttttataaaaactgattaaagcgactgcgctataaaacagggaaacaaataaaattgaaaaaattttattgatcccgactaaattacagaattcataagtggcaataatcagaaagatgccaaaaagaataataaagctttcggtagaaaacagaatagaagttagtaataaagcgatataaacagcaccagaaatggttctcttgagtgtttcgttcatcttaaagatcttctaagagcaataaatacaagtttttggcaacacttccgtattgcgtaaaatcttcttcttttgctttttcgaaatattttattgtggtaatattagtagggtagtctctttcgtatttgcgtttgatcgcgcttaaaccatcgcttttgatggaaagtatctgacttgttgtagcaataataacaatgtttgcaggtaattcgtttggtttgtcctgtctgatttgtttagatgagaataaaatagaaccttcgtcagcaatcagattctcacaagtggcaagtaaaaattttggattccttggcgaaagataaagtagtttattttcttcaagcaaactaaaaagagcaggttcataacatagaacttcgttttcgaaccagtcgttttcttctaaaatgttttcaaattgttctgcaacctcctgtttgttttcgcaatacaagaacttacctccattttttttgaaattaaaaatgaatctttcatcgatagataaatgactgtcaggagcttggtttgccccgtattcactttcatgttcttcatcagaagctggctcactggagccaaatatttttttgaaaaaattcattttatatgaaatactttacatgttaattgaaaacgttcaaagataaaaaaatcttaattcaaaagggtgttttgaattaagattttaaaaaatattacatatttattgaattatctatgaaaccacttcttctaaatttttatcaaaagtgcgttttccgaagatagcttctaagtcatctttgaaaataacttctttttcaattaatatgtcagctagttgatttagcttgtctttattttcttcaagaatttcaatggctcgttggtactgaccttcaattaattctgagatttctttgtcaatgatttttgcagtttcgtcagaatatggttttgaaaaattgtattcgctttgaccgcttgaatcgtaatacgtaacatttccaattttatcattcaaaccatagatcgttaccatagcacgagcctgacgtgtaactttttctaaatcgcttaatgctccggtagaaattctgtcaaaagttactttttcagcagctcttccgcccatagtagcacacatttcgtctaacatttgatcggttctgacgatttgtctttcttccggtaagtaccaggctgctcctaaactttgtccacgaggaacaatcgttactttgattagtggtgcagcatgttctaacatccagcttacggtagcgtgaccagcttcgtgaatggcgatagctcttttttcttccggtgtaatgattttgtttttcttttcaagtccaccaatgattctgtccacagcatcaaggaagtcttgtttgtctactgctgttttgttgttacgggcggcaataagagcagcctcgttacaaacattagcaatatcagcaccagagaaaccaggagtttgtttggctaagaaatcaaggtcaagaccttctacttttttgataggtgctaagtgaactgcgaaaatttcagctctttcacgaatgtccggtaagtcaacaaagatttgtctgtcgaaacgtcctgcacgcattaaagctttgtcaagtacatcggctctgttggttgcagccagaacaattacgttagagttggtaccaaaaccgtccatttctgttagtaattggttcaatgtattttctctttcgtcatttccgcctgacatattgctttttcctcttgctctaccaacagcatcaatttcgtcgataaagatgatggctggagatttttctttggcttgtttgaataaatcacgtacacgtgaagcaccaacacctacgaacatttcaacaaaatcagaacctgataaagagaagaacggaacctgagcttcacctgcaactgcttttgccagtaatgttttacctgttcccggagggcctactagtaaagctccttttgggattttacctccaagattagtgtatttttcagggttttttaagaattctacaatttcttgtatttcttcttttgcgccttctaaaccagctacatctttaaatgtagttttaatatcggttttctcatcaaacaacttagctttcgattttccaatgttgaaaatttgtccgccaccgccaccggcaccacctgacattttgcgcataatgaaaatccatacaccaataatgatgatgatgggtagcagactgattaaaatgtcgctccagttgtttttctgtaagaaattaaaatctttcagtttgccttcgccaactgctttttcaagctttgtttggaagatttgatcgttaccaatttctaaagtataatgaggacctttattaggtctgtcaaaaatatctttagctacttttttattagctgcgtctttaagagccgcagcgtttaaatatacttcagcttcagctttgttataaacgattactttttcaatttgccctttttctaataaagtgttgaatttagaagaagttaattgagcaggttcgcttaagtttgatccaccggttgcaaaacttataaataaaaaaaccagaagtattgcagtatatattaaccagggacttattttaaatttactcggatttggattattatctttagccattagaagaaattttctttagtatttgttttcgattgtagttattttggcatcaccccaaaggctttcgatgttgtaatattctcgaatgtgtttttggaaaacgtgcactacaatgtgtacatagtccataagaacccattccgcattatcggttccttctacatgccagggtttgtcctttaaatcttttgatacagttttttgaattgaatttacaatggcattaacttgggtatttgaacttccgttgcaaatgacaaaatagtcacaaactgcagtgtctatttctcttaagtcaagaatatcgatatcatttccttttacttcttcaatccctttgattatgttcgccaatagaacatcattattaacagtctttttcgccatgaattattttatatgaatttgtaaagttaccaaattttgtgattatttttgaaccttaacaaaatattaaattaagttatttaaattacttaaatgaaactaatcaaactcgatgccatagattctacaaacgatttccttaaatcattgtcaagtcaggatgaactggaaaattttactgtagtgacggctgaaaatcagacaaaaggcaaggggcagatgggagctaagtggcaatctgaggtgggtaaaaacttaattatgagtgttttggtgagagattttgtctttaataatgaacatgtttttaaccttagcgttatagtgtctttaagtgtaattgaggtactaaaatctctaaatattcctgatttaagtataaaatggccaaacgacattatgtcatacaataagaaaattggtggcatacttatagaaaatactctcaaaagtgatggcaggattgtgtcagttgttggattgggcttaaatgtcaatcagactaattttgatgaacttccaaatgcctcttcattggcagtgatttcgggtagtagttttgagaaagaacttttgccttatttgattgtcgagaaaatgaaagagacgataggagcatgggaagttaattctaaacatttatggtctgtttattttaattcattgttccgaaaaggtgttccaatgccattcaggaacctcgagaatcaaaactttatgggaatcattcagggggtgtcacctgtaggcaggattcaaattctgttggaagacgattctgtttcagagtttgatattaaggagattcagatgctttattagaaggttctaagtttttttttgaggttcaaaggttcaaaggagcaaaggctttgtcgttttaattgtatcgtgtgtcatttcgacgtgaggagaaatcttcgcgagaaactcggcaaagattgattatttatattgtaaagacttttatttccacgaactaggaataaataatggtgcgaaaaaaaacctgattgttaaatcaggctttcatttataattcacaattaataattaatcattgttaaagtttagtcatattgtttgctaaagtttcgatgaacttgctgattggtcctttgatcatcatagccatcatagcattgaattcgccttcaaaaaacaattgaacggcactttctgagccagaaacgctgtcaatatttgaagttaaggtaaatggaagtttatcgctcgcagctcccagaacaattttgcttggcgcggttttgtctttcattttaagttttatttccggcatgcctttcaatccaaaaataaaagcatcttcgccaattacttcaaatttagcaatattatccggcattaatttttcgaaattctttacatcagtcaataagtcaaataaatcctgagctgatttctgaacggtaacttttggactttctaagttcatatattaatttgtttttttattttcatttaaccgcaaagggcgctatggattttgattttctttgtgtatacaaacgcaaagttcgcaaagctgtattttttaataatttacaaaaggagcgtagcgacttttagaaaatctaaaatctaaaatctaaaatctaaaatctaaaatctaaaatctaaaatctaaaatctaaaatctaaaattatctttaatgcatataatattatcctaaaatgatgcaaaaacaaaggagctgtgtattatagtgagtagtgcttttcaatttacgaatacttctgctctcaaaatctcaatgaatatttatgacctgtactcaacgttccggtactatagagggggaattaaattaagccctatttttgcatttgccaaatcattccaattacaaaaccaacttttcattaagtctaaaaccgtaatcttgccaaacgtcagatttaagaatgtgaatgatattacgaacactcacaaacattcatttataaatgatcctattgcatttatagacaacttgataaaccaaatgtttataaaataagaagccctaatgttgaatttgataaaaaaatcaatagcaattccactagagaatattgtaaatgatttcaataaaatatctaacgattatagaatattattaaaagaaaaaacacttctaaaaaaaatctgtctgaagaagccaaaaaaaaaaatgcgcaaagttcacagtggatctttgcgcagatttttatagaaatactttagaaaacaaggatctaccaaattgttattctgtctttcttcggtaaaaacattttatctttaggctgtacattaaaggcctcgtaaaaaggtgtcgtattcattaaagtaccattcacacgccaaattggtggagaatgtgggttattgttgatccacaaacgcaggaactcgtctttcatttttactctccatattttggctaacgaaataaagaaacgctggtccggagtaaaaccgtctatttttgtgtttccttttccttgttctgtcattttaaaagcatcataagcaactgctaatccggcaatatctgccgtattttcgccaactgtcatggcgccattaacatgtagatcgcctaaaacagtataggtgctgtacaaattgatcacctgttgtattctggacttgaactgtgcataatcctcttttgtccaccaattttttaagttaccatccttgtcatattgcgcaccctgatcgtcaaaagtatgggttatttcgtgaccaatcaccattccgatacctccataattaagggcatcatctgcgttattatcaaaatagggagcttgtaaaatacctgccggaaaaacaatttcatttgcagtagggttattataggccgtaacagttggaactgtagtataccattctgatctatcaaccggtttacccaattttgccaattgaaattgataggcagctgtagcggccgaaaccatattctcaaaataagcatctctggcaatattcaccttgctatagtctctccatttgtccggatagcctattttcttagtcatggcagccaatttttctttcgctttttgtttggtaaccggactcatccattctaatttatcaattcttatggcataggctttttgcaaattattcacgaggatcaacatccgttttttagcctcttccgaaaaatatttctttacatacaattcgcccaacgcatcgcctaagtaagtatccagaacactcgccattttttcgccgcgcgatttttgaaccgcctgaccagaaagcactttggtatactcaaatgaggcatctacaaaaggtttacttaaatcgtcgccatatctttctaaagaatttgccttcaggtaaattttccaattattaaggggaatggtttttaaaagcttattaagggcatcataataggcaggctggcctacattaatgaaatcggttttagctcctaaattatttaaaaaagtagtccaatctatgttaggatgtctttttacgagctctgacacagctattttattgtaattggcctgcacatcgcgaagttcaacttttgttttatgcgaaccagctagttgtttatcgataccgtaaaccaaatcagcattctttttagcctcatcagcattgctgcctgtttgttgaaataatgtcgttaggtattttttgtaagcttcctgtatggcaacagttggtgcatccgatttaaaataatagtccctgtcaggcaaaccgatacccgtttgatagatttgagcaatgttcatactgctgtttttttcatcgggtccaactccaaaagctataatagacgaattacctacttttacttcattcactacaaagttcattagggacggtaaatcgctaattgcttcaatttttgccaggagaggtttgataggtgtataaccgcgtttgtcaatggttaccgtatccattccagatgcataaaaatctcctactttttgcgctatacttcctgctgaattcttgctttttgaaatactgtccaatattccttgcagacgcattcgttgcgggtaattcataaacatgtagacacctactccggcttgagatgcaggtattgatactgaatcataccatttaccatttacatatttaaaaaagtcatcacccggccgcaatgtggaatctattccggtgatcgcaatatttttttgtccctgatgtttggaacacgctgtaaaagctaagaacgcagcgaaaagtgctaatgattttttcatagtctaaataatttctattaaaatgaactgaaaaacgtttgaaagcaggtatgctaaaatgtataggactggcatatttgattttagcagaacaatatacgaattcagtttttaactttaaagttcttgttagaattacaagttaaaaaacttggaagctatgaaaagagaaaaatacttaaaaatccgttttcatcagcgttttcgtctagcgaatctgtataatctgcgtactatttgcattccaaaattcattaatttatgatttacaagcagcaatcataataaaaataggccttcttaattcgtctgtcatttccggatatttttcaatgatttcttctgacggcttaggctcggatatttgtgtgatgttaaaccctgagttaactacggcatttagaatacctgctacagttcgatggtatttcactactttatgacctaagaaattggtttgcctcactccttcgttctggtaatggtcaactggccaatgcagtcggttttcattttcatctttataccaatcctgctccgcttttgccgtaaaaacaggatgttccatagaaaaaacgaagctccctcctctctttaaatattggtttattttaccgaaaagagcctccaaatcttgtatgtaatgaaacgtaagcgaactgaaaataatatcaaagtgctcgttttcaaattcaatatcttcaactggcttttgatcatattctattgataatcctttcgaattttcctttgctttatcaatcattttttttgataaatcaactccaattacatgctctgctccttgttcttttgcgtaaatacaatgccagccataaccgcaacccagatccagaacatttttgccccgaaaatcaggcagcatattttttaaaacatgccactctcctgctgcgtttagaccttctatcgaacgtggcattttaccataactctcaaaaaaatcaatatcatcataaatattttgtttcatctcttactcttttttattaaacctaaataatacaataacgaatatcttctctctatccctcttatcattttgtactaaaagtggaatacacaaaagtacaaaacctaagaaaattatgcatacccgctcaaaatgcccataccgcttaacaattaaataatatgttttcttaataactgggtttgtattcgtaattgtttttataaatttgcgtcctaaaatatttagtagttttttagctcgctgtatttcaggcctgataaacaattacccattaatttagtcatttacacattaacaattatgaagtcctttttactttttaaagtgattccaaaaacctcttaatcactcttaaaaaatcaacttttcggttttgcttttttatatcaaaaaccgccacttacactttaaccctttaattatcaaacaacaacaacaacaacaacaacaacaacaacaacaacaacaacaacaacaacaacaacaacgtccagtctttatcaataataaatcatattacaatcataactaaatacaatgcttaaaaaacacagcccccaagttctaatttttatacttttcagtttatttttctccattagttctcttgctcaaaaaaatatttacgccggaattgaaatcggccgcagaacgataaaagtttctgttctcgatgtcagtaatattaaaaaagcagattacaaaattatctattattcaaatgacgaaggtctgagtttcgccaaacatatcactgctactggtgaacttactcaggaagatatcaataaagcaggtcttatcgtttttactcaattgactaaaataagagcacaatttaagattccggaagaaaatatctttttagtggcttcttctgtttttggatctgctcgtaatgttgatgctttaaaaaataagatcagcacgctaaccaacaaagagcttgatattatcaatgttgatgaggaagctaaaatactagttaaaggttctataccacctgttgattatgctaacgctctgcatcttgatattggtgctgcaagtactaaaggtggatacattgatgaacttcaggatggtaaattagagtttattcctttagaacttgattttggtacgatgtcacttactgatgccgtaaaaaaaacggttgcaaaccaaagccaggccagcgacatgtctgtatatcaggaaaaatcttttgattttaatccgattgttcgtaaaaagataaaggatatgcttgatgcaaatccgcttttattaaaaaaggaaaaaatctatctgtccggtggagctgtatgggcttttacaacattgtattacaatgagaatacgaaagaccattatctgccaataaaactggaagatgttatcgattacgatgcggttctaaagaataatttcaacaagtttaacacccttgctaaaaccaacaccgaagctgcaagagtattaaacatatacgaccagaaataccttatttcggcaaataacatactacaggcctgcgtagagagtattcctaatttagagaagaaaaaaatatattttgtaaaagaaggcccaataacctggttgatctcttacattgcagaccgttctaaaaaggtaaataccaatttttaagaacctcatcatcaagacaaagcttcagaggaatctggagctttttttttctatgaaacatctaataaaacaaaaagtaacattgagttttacactagtttacagcttcatatccgagctaatattccgaatgtatttgcgatttactttaaatgtttttccgaaattataggatgcatttactaaaatcatatgagatgtatttctgttgtctaacacataataattggtattatttgtaaatcgcaacattctgtttgcatcagtattcaaaatatttctatactccagattgatatttaatctgtcttttaagaaatttcgggatacactaaatgagatatcaggtttcactgaacgatacaaattaaaatcgtaaaacctgtcaatataataagagttgatcgaatacatggtacttttatctatattcccgctaaccgataaatcaagataatttacaaacccttcatacatctcattctccttcttcatttttaatttggtataactatagttcaaattaaatctggattctttataaaatttaaatgagactgaagtaccaacagaactactactataagaatcgagatttgtattttcagaaatcattttgtagtcatttagttcattaacaatagaaatattgttagacgatgttaagtagccgaagtttagagttacatctactttctttatattcctgaccaaatcgagagaaaaagaatcattaatttccggctctatgtaagaaggattgacaactgaattattattaaaatcctgatacgtaaaattagaaattgatcttatacttggtctgacaacgtaccgcttataattgaactccaaatctactatcgaatcaaatttcgaaaaataagtaaaatttggcaggtaaaaattatgatcaaaaacagcttcactgtttactttatctcgagagaactgaaatctgttgccaaatgatactgaattattagggtttaaatcataactaaaactgacaaaaggggtaacaatattttgcttcacctcactcctgtttgtcacattgtcaaaaacataattgcgatcggtcaataccaatgccgattgaatataaagtttatcaattgactttgagatcgaagaactaaacgtccattctgtaaatttttgattcgacttattggacttattttcaattttattattattacttacataatctaaattgagtttatactctaaattattttctgtcttcttctcgtaccttaaatttgtgctataatcccgaataagaaaaaaataagacgcctctgataaatccggaaaaatactccttctgttttcatctactatggagtatttgtttcgcagcgaaagactgcttgacttatcgatctcaaaaatagtaagcattgaaaaatttgactgatacaaaaccctatgattggaatagtttaaagttttatcattgaacatttcttctgaactgttatcggaaacatttttaagattagaaacattcagaattgtcgaaaatttattttttttataaaacagattcaaccctaaaaaattgaactcctgcaagagccccagcgttccatcaactgtaccttttatattatcaacattaccattattgtcctttacttttataacaagttcggtctcgccattggacaaattaaaataattctcaacaatctgaaaggaaacaatgttctcagataatagcttaaaaaattcttcctgagtgattactttgtcgttataaatatagtttttgatttttttgcctttaaaataaactgtcttgctattatccaaagtaatattctcaacgcgtcgcaacgttttacccatgttttcatttttcaaaatttctttgggcaaatgaagtttatagataccagcttttctcttatttttaataatttttatctcttgaaggatttccacttttgaggagtcgacccattcatttttaactatttcctgagcgaaaacaacaaatgaatttatagcgaacaatagcgtaattatttttttcattctgatacttggcaacgatagcggttaaattttcaacttataaaggcaaaatttggcgcaaataaaacaaaataaaaaaactcaattccactatttttataaaaaaagtaccacaagaagcgtatcggataagatactatcaggccgagataatatgagtcagagtttaaaagttagctgattctgaaattatatatttcgatctccaatttatttcaaaagcataggatactttcagaaagttcatctttataaaccaaaaaaattgcaccaagccaaaaagactttgtgcaattttaaatcgaactctttaccaagttcagtaatcaactaaaaatatcttgacttcttagaatctaatttcccggcttctttcgcaacctgatcttttgcatgttttaaaaataaaatgcatctgttttcgatcaatttatcataatcgttattgttatcttgcccttctttatttatagatactaccgccgtttcaaacagatattccataatcttagtttctttttcattttcatgatcaaaaggaagctcaatctcctgaatgtattttaataatgagaacaaactgtttatcgataattgatctgaaaagtatcctaaatgcaaataaataagtcctaaaccaacttgctcaatcacttttctaaagagcacccttttaacagccacatgattatcactcaaataatactctgcatcatcaaaaagctgttttgcccttaaaactttgtctttctcatatttttctttgaattcagattcccaactaggaagatgttttttaaaataaacagtataataaggagcattgtaaattaaaagtccgtgcgttttgacataatcgaaaaaatacttccggtatgtcttttccttacggattaattctcctgaatggctaagaatggctacctgatgcctgccttcaaatttttccagaataagtccttccattgaggagatttcatcttgagtttgatccagactaatgatcagcagataaaaatgatacccaggaagtttatcagaataattttggggcttacttttctgatcgtgaagtatggtataaccaaaacagtaaacacatcttatgtttgattgagttaccatcaaatcgttaatactttttaaagcatcttcaacaaaataatcggatggaatcttttcgttgaaaatatactttccggtacattcttgcctgcttaatttctgcatcttttccttacataatgctttatactccaaaaataatctgttcaattctttctgcattgactccacttttatttttgccttaatcatcagctccggatctatatcacccatctctgtattttgcatagcacaggaataagctttattaagcattacaactatctcattatgaactgccatattcttattgagtattcttttaaatgaaggcgcatatttgatgatgtaatcatattgctgaaacaaacaagtattgctaataaagacggcagtgaaaaattctgaggcacagatataaatataccttaaggtctgatacaaggcaaatacggcttcttcatttttattttttccgctataaaccgacacatttctaaaagataccactgcagcttccatatcaagagagaatcttttttttgcttttttaagcagctttttagaggtgtctttccgagggtaaaaaactttagctcccggttcaaaataaattaattcttttaacgtacaatgctgaacaaagtaaggctttccatttttaaagccctttttagcacagtcagaatccataaacttaaaaataaactcgggatagatacttattactttctcctttacctgatctaaaacctcctcatccttatcggtctctttttttagaataaaagtgatgactgttactttattgcttttagtaaaagacacataaatggcttctgctccaacaaacggaagtaagtttacaatagccatttctaatcgttccttataggggtttttcggatctattctgagtatataattcatcttttattctttttatgttaaacctcatcgacctatctttcctttactttcattttacaacttaaagaacgcctgagaataatagctttatttttcttctgaaattttgactaccttaccctttagtagtgtattttatgtttttttttgtacgtttgtttaaaacatcattttgtgcttttttacttacaaatatatagattttatcctataaatagcaataaaaatatgttataatctaaaaataattgcaatgatcgtaaatagaatcttacaaattattgaatataaaggaattaatagaagaaaattttatatcgaaacggggctttctaacggctttttggataaggttaaagatgttggtgcctcaaaaatagagcagatacttcgcatttatcctgaaattaatccggagtggctcctgacaggaaaagggcatatgcttgaaaatgctgccttttttgagtatgaatggggaattaaaatgagtgaaattgaagaaccttctactgtttacgaagtcaccactacaaaaacacttaagaagcagtttgtaccggtctatgatgttgaaactgctgacggaatggtttccctgtttaaagaatctgaggaaaaaccaattgactatgtctctgttccaaacttacccaaatgcgatggcgctatttatgtaagtggagatcgcatgtatccttttttaaagagcggtgatctgatcatttataagaaaatgagcagcagaatcgaacatattatttggggagaaatgtatttggtttctgtagtaaccgatgaaccggaagaatttctcctgatccgatgggtacaaaaatcagacaaaggagaggaatggattaaactggtcagtgaaaacagtcgatacgaatcgaaggatgttctccttaaaaatattgaaggattagctttaataaaagcgacaattcggatcaattcaaacttttaacattaaacactaacaatcaaaaacttaactaaaatcccctaaaattgtgaatatctatttcacaattttaggggattttttttcggtaaaatctatctttggcatccttaaaaaataataaagatgagcgcaacttggtacgaatgcaaggtaaaatatagaaaaacggacgaaaccggagggcaaaaagttttaacagagccttacttggtagatgctttgtcttatacagaagctgaaagaagaattaatgaagagatgtcggcttatatcagtgaggaattcaaaatcaccaatataaaagtggctaattacgccgaaattcacccttttgaaaatacagaccgttggtttaaatccaaagtctctttattggcttatgatgaagaaagcggtaaagaaagaaagtcaaatatgtacatgctggttcaggccaatgatgtgagagaggcttacgacaacacgctgcatgtaatgcaaagcaccatgggagaatattctatcccggccgtttctgagtcccctattatggatgtttttccttatttcagtggagaagaaggagaaacggagcaattggaaagatttaatagactaaaagcatctaaacctgcacaagcagctgcggaggttgttgaccatatggagtttgaaactgcattagaggaataggttttaaaattaatgcaggctctttcaaagaagctgtgaatagtgtacacgaatctgacagcttcgctaaagcgaagacgcagatttaggcagatttcttttttttagatttctctttaaaattataaaaagcaaaagcttcggaattctccgaagcttttttatatatagatttttgcacattttctaataaaaatagatcaatacaaaatgttgtggggctgatagaaattattccttttattaacgatttcagctctacatttaagagaccattttattacaactgattttataattagcgctaccttctggcataaagatttgaatgtttaaaaagggctgaaagcccaaaagcataaaaatagtgcaacgcactataaatttagataatgaatcataatgccctgaaggggcataagcagtcataaataaagcataagatcttgattaaaagttgctaactttcggaaatgtcataaaataagataggtgctttttgggttatgctttcactcttacagggcttaaagaagtactcattagtattcatggcacttcgtaccatgttaatgctaaggctctttcagagcaacagattctaaatacttgtctattatggggtaagctgtaaattattatttttgcaattaagaaattttagaaaaatgtaaatttttaaaaaactgtaaaaggctgctactttcattcctaaagtgatttacagtaaagagaatactatttttatcactccacagcttttgaacctgattctttttagacttactaatacttatgcctaattttataaatccacaggttttcttgttgatccatattggtggtatacaaacaagatgttgaattagtgagaatgaatctatggtcatttctgataaagcaattagtaataacctgcagagcaatgtgacataaccattaattttaataataaaaataaattatgaataaaagactaattcgtgctgttatttatgtgtgttttatacctggtttgactctattagtgggagcattttgtctttttcaacagaaattaaattttattgaaaaggcaagtattgtttatggtacagttatcgaatcgatacctcttgctggcaacaagaatggatcactctattatccccatgtttcatttgttacaaaatcaggtaagccaatagatttcacttctactgtagggtcttctcttccgaattacatggaaggaagttctgttaaggttttgtatgatccaactaatccgaataaagcggagattgatgggattcacggttacattgtagacccaatgcttttgggtggtcttggcgtatttttctttttaatgggtttaggtgttgttttaaacgagtatcaaaaaagtagtaaaaaggactgatattgagttttcaagcctttgatttttgaatttacataatattaaaagcagaataatagcgactcagaagtaatgagcgggatctttatggattccggaattttgcggggttactcgcattaaaatgctttagaatctttttgggtgcagtgatgacttctttacgaatagaatcaaaccattctacttctttaatgagctcagcgcagcattcgtttttggaattataaaagcaacttttaatattgattttgtcattcatgaagcaatatttcatctcaacaaaaaaatgttccgtaaacattaggtttttataacagaccagtgcatattttccttcttgtaaatcgagttgtaaagaatttagcttttctcttgaaaatccattttgaaataaaaaacggtagagtaatcgttgtgtataggagttgtatgcggtcttctccatgaccatgagatcgtttacgtcctcgcctgtaacaatataatttttgcagatcatttgaaattttttaggttaatagaagaagaggccagctaagtatgaaactgacctctaatcaatagtcatgtttaataatcttttaaagtaaaaagtgattgggctggttaatgttgaattggggaattctacttaccaattaagcctgatcttttacaatggattatttaactaataaaaaattgtaactaatcttaattttgtcggcaattttctttctgacaagacttggtatttcgatgtcaaaatcttcaggtttgacttcaaatgaacctacagtactaagaccattggctgccttggatattttgatgcttactgctataggttttgtttttccatgaatggtaagatcgccttttagagtaaaatttttaggggtattggtaattttagaactgtcaaaatcttctaatttgccttttaaagttgcttttgaaaacttttcagactccatataattttcgttgaaatgttcctccattaaagcaactttaaatcgaaaaccttttatcagaaccagagctgcgaaatctcctgtagattgatccaaaattgcagacacgcttttattttcagcagcaacttcttcataggtaggcatagtagcctgaaattttatagtacctgtttttgtgattactttttgtgcaaatccatctgtgtttatcaaaatagtcaacagtactataaagaaattaagaaacgattttttcataataattaattttcttttagtccgtctgtattccatttcacaatcaaatcgatattggtctgagacattcttcctgcctgaggcataattccttgctgaccgttttgtagttgaattcggttcagtaaactggcaccttcagtggctgtttttacttcggcataagtggtcaatggtctgaaacctgcggatcttccgctttgatgacagcctacgcaattggcatcaataattgcttttacatttttagaataactaattgcagtggttggtgtttcaggtcccggagtaggattatctgtaaccggaggagtttctatatcttggtaagtatcagaatcactgcagcttgtaaatgttagtgcagctgctaaaattgtaaatgctaatgtttttttcatggttttcttgtttatagttattaaaatactctgtataagttaaatccgaaaaagaaatctcctttcccccagtttccggcggcattagtaaggtatccgctttcgctcatagcttgtgaattggtgaaaattaattgaaatacatgccctccggtttcgacatcgagaccaacggacagtgggttttcataaaaattaggtttattaaaattgtgcatgtattctaaattgacagacaatcttttagtgattttataacgtccgccaccaccaaaagaaaattggttgtctctttccaagtctggattgtaaagatttctatgcacaaatgagggtactagttctaaggatagtttttcgctaacttttctagatattagtaattgttgtacataagtcatacggtgcttaaattctaaaccaggatattgatctttttccaaaaatgtattgatatccgcaacactgtagccaacaatgtctacaggaaagctgtcgctttgtctcatcattcggtatttcactcctgtttcatataatttatttaaggtatgtctggacaggcttacggatagccaatcggtaacaccataaataccgccaagttttgtggtggcattatcaaggcccaaaaaactgtcaaaaccatctttaacagtgccaaaacggtgtgagactacaaaatagaactctttttttgcaggcatttttgtggtctgtaaggtcaccagctgcaaggctttaaacgttgctgtagaaaagtttttttgtacctgagcagagtcaaggctgtttagtaaatcatcttgcgaataggctatagtagccaggaagaagcagattgggactaaaatttttttcataaatggaggaattgatttattgattaatggtgcattggtctagtttgacttcttgaaataattcatcaaagccaatgcatttgcctttaacggttactttactgttcaataatttgtcttttgttttttgggttaacagacaaaaaatgttgttttcaagtatcacggcagaatcggtttctttggttacttttccggttatttctatcgttttattgagatataatgaatctgctttttctgtatttgagttataatcatcaagcaattttactgttgttatgctaaactcaggtatttcagattctatattgcgtgcttccttgaagagaaaaccgtaataaaaatagaggcctgtcgaaatcaatactaatgaggctgtaattgcgaatgcgattttttttgggttcattttttattctttttttgatagggttcagtagtaaaacagctttaatgcggattaccctactttaaaagcgatattttttaaaaaaagtacgatattttttaaaattcggttagtaatagtgtgaggatgaggttttaaggtctaggctctttagttgttgtaaggttggagaaaaggtgaaaattcaagttagtccaaccgaaagttgaactaacttgaataataacaggctaagtgagcgtataaatgaattggatagaaatagtatgtttcttagatcgcaagcggcgaatcttttacgggtactggccaaacagcgggacttggaaaactaattcctttattggcgcctcttacgttggcatcttgaccaaaataatacaaaggccaaccgttgtaaaccaattgagatttgccaaataccgtaatgacagaaaattttgatttgtcaagagtagaaggaacgactattttgtctgtttcatagataggccaaacggcattgtttgaaaaatctgcttttgtaaaattgtttttcttgaaattatcattcttaaaagtatacagcgtcagtccttttgcgtctgtaaagtacgttgtaaggccatcaccaacagtgtaatcagatttgtagttttttccgtcatgtcccagaagctgacttctgactaacataatcgaatagtccggtttggctataaaccaaacaccgccaacaccatctcctgttgtttgtccggcagtttcgggtgtattagttccgtttacacttggcgcatagtaatacaatggccatcctttgtaagtcagctgttttttacccgatgtggtggttatggtagcaaaatcagagagtgttaatccactacttaatttttcagcagttaaattgtctgcataaaatggaggccacacagcttcgcatccgcctgtacacgaggcttgacccttggcgtctgttgcgaaaaaatataaagattttccatctttatcagaaagataagagcctaatgtggtacttgtggaaagtgcaatttcttttttggcttccggactaatcgtatcgttgtctttgtcattgctacagcctgcaaaaaataggattgccgtaagagcagtaaaagctagtttaaatggttttgatttcatggttttttaatttaggttatatgaagtgggaaatgtgctttacatctttagtaaagtgttttattataatgtccagatatcagcaagaggtacttgctttgggtagttaattagcgtaatgaatttgatgtctatgaactgtcatagaaaaaatacgctaaatggtattggatgaagttgtttcctaaagtcactttttatttttttgataagattcaatagtaaaacagctttgataaaggttaccctaccaaagaaaagttgttttatgaaaaaaaagaaaaagtaattttaggtagaccttgtggaataaggttagaatgaaactctaaaactcatgtttggagttctttgcaatgagaaagtttcaacttcttctatagaattagttaaagagcttactctgtaatattcactgatttcattctttcggtttaggatattcagaatcgacaaacctagtttgtattgaattccatttgtagtttcccacttgtacgtagaggaaatgttaacttgtgaaaaaatatggacattggtattgtttggtttgttgtataccaatacaggatctgagagattaatttgcgaaaaatcaggcgaggtttttggtctgccggacgaccattttgtacccagggctattttgaaattgttcttttcgtaaattcctgcccacgataccgtatgcattacctcaaaattgttgggaaaacttggaggttcaaaattggagaaataataattattgtggttatatgtataactcaaccaggttaaaaagtgattcatttttttctgaaccaacatttcagttccaaaaacctcataatcaccagtcattcgaacaaattccaattgattctgaaaaccctgactcgaggttataattcccgatacttttttgtagaaattttctatatccagtagccagttgttctttttgtagaataaatttaaagaaacttgtttactcctttgaatgggaatggttgaattgttcgaaacaatccagcgtcttttttcgataccaaaataatctttttgcaaatcaataatttgctgcgaattttggctttttaactcagccagcagttctaaatttaaactcttgttgatgccataattaaattgaatgcgaggttcaacattgtattttttaaatttttcaatataattaagacgagcccctgctttaaaatagattcgggaaagtgtgtcgttgtattttccttctaaaattaacgcatgggtttttagtacatcttttactttacgataaaaatctggattagttacttgttctaaattagcaacaccaatctcgttgaactgatagccatcgctaaagctaaatcgggagttgataatatggtggttttccagattaattccattattattcactgtattctcctgaatcacgatttgatctccaatagtcgttttttggttggccaaaagttcataagccgaattataaacattaattttggttgtattatagttgttccagtttcttttccacgacaaatttccgccataattttgttggcgtaaaacattgttttccgatttgttcatgtcgtataccgttgcactttgaaaaacttccaggttgtctttaatcgtaattaaatcgagtacaatttgatctttagcacctattttgtgcgtatattttaaggtagcatcataaaagtcaaattttttatcactgcgataatttatattttgtttttctgaaaagtcggtgatcgtagtgttttgaaatactttattaaaatattccttataggttggggtttctacaaaatcggtaatcgatttacgtgccgaaatttcgatagaactctttttggaaagattgtacttggcgtaaacatcagcgtttatcatattgattccggcgctaaaagtatttttttcaattgtttcaggagtagaggaaatggctacaacgctggacacactctcaccgtagaatgcagagctcccgtttttgtaaatagaaatggtatgtgctaaattgggattaaaaacagatattaagccaaaaaaatgtccggtttggaacattcgtatgccattccataaaaataaattctgatcgtgagtgccaccgcgtacgttaatgctggaaacactttcgtcaagactgttgacacctggaatttgctgcatggtttgcaaagcatcaggttctataagtcctggtagaataccaaatttcttaggtttaatttcaaaagatccgtccgggctttttgaaatccctgaagctaaaatagcattggctttaatttcttgaagctctgttatttcagactctaatgttatgtgcaggcaatttttgaaagaggaattattgactacaatttttttggtgataaaaccaacatgactgaccagaagggtgtttttggagtcttttttaaattcaaaatagccattggaatcggttgaaacctgagttttgttaagcaggttaacattggcattttcaataggttttttagtgtcattagaaaaaacataaccacaaattagtgggacttcggtttcgtttttataaatattgataaattggttttctatgttttcaaacgacagattcgttttttctgtcagatattgtagtttctcatctaaagtaagcgattttttaggaggatttagttgtagaccgctaatattgtcttctgtgtaattgaagcttaccttatgttgtttttcaatagtcgctataatttttttaaaaggcacagcttttcctttgtcttgagagaaaacattcaggacaagaaaaaatataaaaaacaaaaaatgaaaccgtttggagaatgacatttatttctcgtcaaatattatcttatttttggagacttttttagcctctaaatgataggttgtactaataatttgtatcgctgtatttaaatccttagcgggtaattttccggtaaatagagaggtggtatcttttgtatttagttcgattgtaatgttgtattgtctttcaacttcgtccagtatcgttctaatgttttcttggtagaaatatatttgattgtcaatccattcgggttttaacgagtttatagtggtgtttacctgtttgccattttcaaaattaacgctttgtccgtgagttaacacaatttgagtgtttgcataattcactcttacacgtccttcataacaaacgacatcaaacttgttttttcttaccttaacattaaattgagttcctaaaacggatacttttcccaggctggtctgtacttcaaatcgttggcctttggccaccttaaaataagcttctccttttaattcaaggtgtctgttgttggtccagttccattttttataccttatttcagaaccggagtttaggactacttcagaattatcgggtaacgaaaaagtggttttctctccaaaatttgcggtttgagtctgaggaatcaaaagtttcataacaaacgtaattccgagtaccaacacaaagacagcggcagctcgaaacatccagtttttgtataagggaattgcttttggagttaccgttttctgattcagtatgttagataacatggtattttcatccaaatcacctacttctaagtgagcagtataattcttgattttttggtatttttcaaaatcgggacttgcttcaaattcagctaattcatcttgagataaatcattgttaagccattttgctaataagcgattttttttcattatgctggtattatgttgttaaaacaattgaatctaaatttaccctacttctataaatcaatttctttgcgtaagcttagcaaagctagatgaatacgtttttcaactgcctttacgctaatatctaacgctatggcaatttcgctgtatttttttccgtcaattcgatgcatcagaaaagcgatacgttgtttttcgtttaaattttcaatggctttcaaaagtttagcttgaaattgtttctcttccagaatatattccggattttcatttgttttatctaagccgctgaagtttttctcatatctcaaaacaactttttgatgtgcaattgcgttgagactgctattattggcaatcgtatagaggtatgtttttgctttttccagcggtaccgaagcgcagttttgccaaagttttacaaatgcctcctgggctaaatcttctgcctgatcgatattgccaaatttgtaaaaaagaaaattgcgaagtgcctttatgtgacttttaaaaaaaatcgaaaagatcatttcgtcgcaagtattggattggtttttttgtggcatttcgtttttcagttgttaccttgcaaaagtatttgtttttggtttaagtagggtaaaagcaaagctgattgttttatacaaacaggaaatattgatttctgttgataattaatgttttataaaatgaaatggaaatccctgatgaggatttattagaaaacaaattctgaatttttgttacctttgtaaaaatataagtatgttccctttaaaaaaatatttatctatagtggttctcttgttcttattgtcttgtcagagcgaaacagacgagaaagacgatacggcacaaggaacagtcacaaatgtttcgccacttgctacttatctgcaaagggttgcaatggtacaaacagtgcaggataatgtgatcgacggatcgagttattgtactattaggctgccatataccgttacggttaacaatgtaaaaattgctataaattccactgccgattataaaaaagtcacagacaatataaatgcaaatgcatatgatgatgatattgttaaaatagattttcctgtaacaatggtatattataattacattgaaaaaaacataccagctgaatctgacttcaaagctttaatcgactattggaatcttaaccctgatttgttgtctaaaattaatggactaaacattaattatcccataacgattaatagctataacagtgcaaatcaaattgcaagttctgtttctattattagtgatcaggctttcttcaattttataaaaaatttgaatagcagtcagtatatctcattaagatatcccatttcgatagcagattataataatcaaacaaaatcaattgcgaataatttagagttcgagaatgcaataaaatatgccattgacaatgctcctgaaaataatcttgtaacactcgattttgtgcaaaccataacaaaggggagttgggagataccatatttttttgatgattcagaaaagacgtcctcttatacaggttatttatttgtttttaaaagtgataaatctgtagtggctactaaaggagcggcatcacaaactggacaatgggaaagcacattgcaaaatggggttagagaagttaaaatagagtttaattcagagccactaaataaattgaatcgaaactggaagttgtttgagtttaataattctcaagttcgattgcgtgatgtcagtactactactgattatctttatttgcaaaaacaatgatactcgcagaacaatgtttttcatgtcagccagatgattttgcatgtactcttattacaaaagaaattattgatcgtttaaattaaatacctgcttatatagagtaacaaccctacaggttttaaaatctgtagggtttgttttttattcctaatatataagagtagtttttgtccagctgagcaaagtcaaagcctttaagcttgtaatttgatatttggaattctatactataatataaggagtttttttgtcgagctgagcgaagtcgaagcctttatccttggtatttggaattctatactataatatagcgtagttttattgtccggctgagcgaagtcgaagcttggtatttgagattctatactataatataaagagtgattctgtccagctgagcgaaaatgcaagaaaagtagtttctgtccggctgagcgaagtcgaagcctttatccactgctatcgaggctagggcatggattctcaaaggaaagatcggccataaaacaaaaacctcgcgcgtttgcgtctttgcgagattagtaaaaacccagtaagaatggggctttgtatctaagagttttatttgaaggaagaaaaatctttcaaacctgaaaatagtttaatttgtaaaagaggtgttatcagactgttaagagaaagttttaaaaaagattaaaaataagtttagaaaaagcttgtgaaagcggataaagtgactacttttgcacccgcagtgttatatattatagaaaaaaaagaaatttactcttttttttctacttttttctaggaattgtgcatgggcaatgtgtgcctacttttacagattcggttttatataatccggtttgttcttttcaatgggttacacacccatcaggaggacaggtcagaattaatttatctcctttaacgttcaataatacctatacatttacaaccgttggggaatcatcagaagatacttttctggctttgtataatagttcgggtgtattgttagcatcaaacgacgatgcatctgattgtataaaatgcaagcaatcaacaattcagtttaattcacaggctttttattcaggtgcatacgtgatcatatcaaaaagcggatgtctggatttaaataatgtaattatgagatttaatgcaattaataattatgatcccccgccaaaaataattgagcccgaaattccattttatccctgtaaaagtaaaagtgtttatctaaaatcatctgctattgttttaccagcaaaaccctggtcaagttctgacccaagtcttgcgacggtagatcctgaaaccggagaggtaaaatttttaaaagaaggtatcgtgaaaattaaattacggggaaatttaaactgtgaaacaataaagacttataatattataaatataccgcagacttctgtaattactcatgattaaaattttgacacataaaattctaaaaaaagtactggttttattaactgtattttttttctcatctgtacaagcccaattaacaacttctacgcaaaaggtatgttttggcacaagtaagaaatactcagttgatttggctgatggcgtatcgggaactccgggttctacatataattggcgtgtagttgaggcaatgttttccggggttattcagaatcaaaacactaattctattaccgtagattggggatctactccagtaggggagtatcatttagaggtaacagaaactaattctgcttgttcaggagataaagttactttagtggtaaccattgtggatcttccggtagttacagtaaatgatgctgtgatttgtgaaggttcgaaagcaactttatatgcgacagtaacacccccagatactggaaatgactatgtttatgaatggaccacaccctctggaggaaatcccggtaatgtttcaagtattactactggtacagctggtaattatagtgtaaaagtgaaaaattctttaggatgtgttagtattgcttctagcgggattgttgttgtaaacccgttaccattggctgagattaccccgaaaggatctactactttttgttttggtggaagtgtggtactaaatgcaaatactggatctaatttgaaatatcaatggaaaaaaggcggaatggatattataggtgcagtaaacagttcctatgttgcaacagaaagctccgattatagtgtacaggttacaaatggaaataattgtataaaaacatcggccccaattagcgttaaagtcaatcctcttcctgttgccgaaattacaattttaccagctgagtccttagaattttgtgagggtggtagtgttacattactttcgaagatgaaaactaatttatcatatgaatggagaaataaaaacaatgttatcgtaggtacttcagcctcttacaaggcaaccgaaagttcagattatacacttaaggttattgatgcaaatggctgctcagctatttcaaaagctacatcagttatagtacatccattgcctgatgcatcaataacagctattggtcctactacattttgtgatggtgacagtgtagttttgaaagcaattgaaaagcccgggttcttataccaatggcaacgagacactattgatataattggtgcaaacaatagttcttacaaggcaactgaaagttctaattatacggtaactgttacggatagtaattttagtacaaattgttcaagaacttcaccatctcccgttaaagttgtaaaaaagttattaccggttactagtcctatttcttatgattaaatataatttgaaaagttataaaaaacacaaatgatgcgaatagtattcaaatcgaagcaaagttattctttttctcttaagattgtattagccttatttcttgtttttttttctttttgctcccgggggcaacaaataatttgctttggcagtgtgagtaattatggagttgacaggtctgagaatttaggtttagggacatcaggatctgtgtataattggatcattaaggattcacgttttgttggaaagatactaaagccttataatgacagaactaatgagatcagtatagaatggaaagatactccacctggagattatcttttagaggtaaatgaaaagaatgattattgtacgggtttaagccaaatacttttaattaaaatccttcctttaccatttgtaaatttgcctgatcagtatctctgcgttgaccctgttacaaatcaattattgaacccaattttgattgatacaaaattatcaaatgaattatataaatttaagtggaaatgtgatggggtaacattaccggatattgattccggaattatagttagtaaaataggaacttatacggttgaaataacagaccaattaaccgggtgtgtaaccaatgacagttcagtcgttggtaaatcttcgtcggctattgcatcggtaaaggttaacagtattttttttgatattcaggatattattatttcagttacaaatggtatcggaaattatgaattttctatagatggaataaattttcaggatgccccttctttttcagtatctaaatccggaatttatcaggttgttattcgtgataaaaatggctgtaatcagatatttctaactgcgaatgtgattaagtatcctaaattttttacccctaatgaggatggttttaatgatatatggaaaatcgatgatttgttgccttcaatgaatccaaaaattagcatttttgacaggtatggaaaattgttaaaaaaaataaatacaattggagagggctgggatggaaaatataatggtattgacttattttctgatgattattggtttttgatagagtataccaatactgatggaagcccagcggtatttagatctcacttttctttaaaaaggtagtcgtttagagtattgctttaaaataataaaataaggttttgcaaaataaactgatttctaaagtttaaaaaaaacataaacaaaacaccagtctttcgactggtgttttgttttttgaagcactgtaacttatttttaaaaaggacttttgtcccgctattcactctatcttttccctgctaaaaaagcaggaaaaaggatgccgtttctatcggggctatgcgataaattttggtttttcataagaaagggtttttttttttaaagtattttgacgaaataaagatttgatttttaatggtttatttgttttgtcgaaagaattaacaaatttgaaaagcaaccattgccatccaacggcatcttcatagtaattaacaattaattattattttatatgaaaaggtttaaattaaaatcagtttttgtagtattatttttaacgattggattggcttcatgcagtaacgataatgacgcaccaagtattcctgaatcaattactaaagctgctttagtgaccgaagtgaaaggtcctgcaaccgggaaggttaatgaagaactgagctacgatgttacctttattgtcgataacgcttgtggagaattcagtaaaattggtgaagtgaccattgggggagtaaaaggactacaagttgaagttaagtatccaacaggagtttgtactactcaggtaccagatcctaaaaagacagtttacaaatttaagtccgcaacaaaaggaacatttgaaatcaaattcaaaaaatcggaaacggaattcgtaacgacgaaagtggttattgagtaattaagtttttagacgataaatcttaggtaacgaaaccattttgcaatcatttgattctttaatagagagggatgtttgtaagatggttttcttttttataagaactggaagataggtgttctttgtcattctttcaaaaaacactatttttgcactctaaattttatgtcatgccgaaaagaaagtataaaatagccgttattcagttaaatctgaatgatgttgccgagaataatcttaaaaaatgtatcagctgggtaaaagatgctgccaataaaggagctgaagtaatcttgctgcctgaattgtacagcagtcattatttttgccaaagcgaagatgtagataattttgcattagccgaaccactttacagtacttcatttattgcttttagtgccttggcaaaggaattaggagtggtaattattgttcctttctttgagaaaagaatggctggaatttatcataatagtgcttacatcattgatacggatggaacagaagcagggttataccgtaaaatgcacattccggacgatccgcatttctatgaaaaattctatttcacaccaggtgacctaggttttcaggctattgagactaaaaaaggaaaaatcggaacccttatttgctgggatcaatggtatccggaagcagcacgtattactgctttaaaaggagctgaggttttattttacccaacagcaattggatggcatccaaaagaaaaagaagagtatggagtaaatcaatatggtgcatggatgaacgtaatgaaaggccatgctgttgcaaatggtgtttttgttgccgctgcaaaccgtattggattagaaaaatatattgaaggaacagaaggaattcagttttggggagcttcgtttatcgcgggacctcaaggtgagattttagctcaggcttctcatgatcaggaagaaattctaattgctgaagttgatttggatctacaggaaaacgtacgtcagaactggccatttttcagagacagaagaattgatgcttttggcgatattaccaaaagagcgattgatcaataagtcaaaaatacctttatagaaaggtaaagaagtagaggctgtttaattttaaacagcctcttttttttagcagagacaatattgttttaaaattttagctttaattcgacgctgataaaatggatagacaccgatttttttctctttaaatgagtttacaattttttaaaatccgtttttatccgcgttttcgcgatagcgaatctgttttatcggcgttgaagttagacgtagaatgctaaagctttttggactttaattccaatcttaattatttatatgcaaaagaggctgtttaatttaaacagcctcttttttttagcagagataatattgttttaaattttagctttaattcgatgctgataaaacggatttacttcgtaaaaacacggagagacaccgatttttttctctttaaataagtttacaatttttaaaatccgtttttatccgcgttttcgcgatagcgaatctgttttatccgcgttgaagtaagacgtagactaaaactgcttttggactttaattccaatcttaagtatttatatgcaaaagaggctgtttaaaaatttaaacagcctctttttatactagcttagaattgtttatttcacctggaaagtaactcttcttacgatttgacgcgcttcttttgaatttttgttcacagaagtatcttcaccattagcaattacattcagtcttgaagcatcgattcctgcatttgttgcaatctttttaactgcttcagctctttttcttgataattcagtattgtagcttgagtttccaatttcgtctgcataaccaatgatatcagcagatttaccaggattgtttttcaggtatttcactaagaaatcaacaccggatagagaagtattggttggtttagaagaattgaaatcaaagtatacatttacataccctccgttaattaattcttcaaccgttttgtttgttggagcagcttcacttccttttttagcataagttttatctaaatagctttctaattcgtccggaacaccattttgattggtatcaatagattgtcctttagtgttaacagccactcctgaaattgtatttggctctaaatcatacaaatcagcaacaccatctttatcggtatcaataagattagtttcaattgtattcactcggtcttctaatttgttcagtctttcattgtcttcagaataccagtcagcatgttttgtgtttttacctaagtaaaacgtcaaaccaacagatgcatttaacagcacaccatctaatgaaccggtagcaggaactccttttccatcgaagttgtggttttgtcttccgttaacaattccggtaagatctccggttaaagcaactctgttgcttagtctcacttgtccggttaatcccataattccgtgagccatataatctttcccgtcaaaacctttatcgctgcttaattgagaaaccccaaaacctccatgtgccaataaaccgaaagtatttgtccaggtttcaaagtttaaagctcttccaaggttaacaaccccttgtaaacttgctctgtaatatttgctatcaaactccggagtgtctttacgttcctgaaattgatcgtatccaacatccagtttcaaaccaaatttaggattaaacatatatcttgctcctaaatcggcatgaaacggactaactgattccgttgaataaccaggtgttatggctctcataggtttgtttaaacctccgtttaattctatagaccatttattgtaagcaggtttgtcaattgtagacggggccgatgtcgttgtcgtgttttgtgcactggcaacgattgatagtagtaaaagtgatactgaagctaatttctttttcatgatatccaaatttttatttaatattatttttgagccttaacttttaaactcaggacaaatttatagtacgaaatttagatagtgttctatttggtcttacataattcccatcttttgggttttaattatgcaaatatgttaatgaaatcaaaatatttggtcaaaaaaaggggctaaatttaatttttagcccctttttgaaattgtaaatgtgaaggttattttaaatctggttggtatatttttacagttccatctccttcactactaacgactaacaaacttcttttggttggacttttagaagccggaatgaagagtattccttccggagcgtcaccggtttttaccgtctgtaaatattgtggtgaagcaggattggttacatcataagtcataaaagcatcagatctttctaaaccaacaaataaaatattctgagatcccattttagcggcaacgactgcttccggctcagagcctttgtcatcgctacgtttgtcatcgtaggttccaagttcatttgtttttttatctgcatcatttttactatcataaacaatttttccggtattcccattccagatagagaaggagcgggccccaaaagcgaccaactcatccaggtcaccgtcgccgtcaccatctcccatatcggcaataaggttaagtcttcctaaattagtctccaattttaaagtggcagcatcaggaaaagcagtggcatccagtttcatgtctttcattcttttaatatctgcgtaggcagcatattctctggcatcaccttcgttggctgtaacaaaataaggagtattgtttgctgaaaaatgactaatggcatccggcatgtacattccttttactttccagggattaaaagcaattttatcgtctttatcacttacatcaatggcattttcggcggtattgaaatttttaaagcccagaggataaagagctgtgatggttttagaagttagatctactttggcaacaccattattttcctgtaaagtcacccaggcagttttagaatcatcagatatggtaatgtattcaggttctatgtcctgagcaaaactcttggcaaattttgaaattctaaatccttcttttttcaaagcttcggcctgaccactaaaagaactgaaatctaaagtggtaacagcataagtagctgtatcaataatagaaatgcttccgtttggatcctgcgtataatcggtgttaggttctccttcgttagccgtcatgatgaattttccgtccggcgaaaacgtaatcatatcgggtaatgcaccaacgggaacttgtttgattaagctgtaatcgctggtattaaaaataaccacttttccatttccttgtttgttaagagttgattctaaagcaacagccagttttccatcgtaaactgcaacactattggaagcaccttcgtacggagtcagatcgattttaccaattttaacgggttttgtaggatcggaaatatcaatgacatcaatttgattcgttccgctattatttactgtaaaaagtctttttgttttttcatcatatgtcgaaatctcagcggcagcttctccgccaatagtgatcgaaccgatttctttaaaagaaccaggattttcgttgaccacaacttcggattcctgattttttgaggtttcatcattattacagcttgccataacaaataaagcagctaataatgaaaggcttacatttttcatttttgtgttttttagttttgccaaatgtaattagcagattgtggtcttatattaaggctttattatttaatctttaacttaatctgttaattagataactggttaatttgttagttattaaattgttaggttgctcaattgcctaattctccaattatctaattatcacattatctaattatcaaattatctcattatctttgtacactttcaaatttagaatcattttatgtcaacaaataatagaaggtttccggcggaatgggagaaacaacaaggaattgtattgtgttttccgcataatggaaacgattggccgggaaaatacgaagctgttcaatgggcttttgtagaatttattaaaaaagtagccacttttgaaactgtttttttggttgtagccgatgaaaaactaaaagaaaaagtaaatggaatgctggaaatgggacgagtgaatctggcgaatgtttcttttattgttcacaaaaccaatagaagctggatgcgtgattcggggccaattattgtacaaaatggttcaaaaagagaagctttgaattttaatttcaacggttgggcgaagtacaaaaactaccagctggataaatttgttcctgctaaaatagccgattttattgatgttccgcttacgcaggtaatgtataaggggaaacctgtaattgtagaaggcggtgcaattgatgtaaacggaaaaggaactttattgacttctgaagaatgtttgatgcatccgaccattcaggttagaaacgcaggttttactaaagaagattacgaggctgtttttaaggaatacttaggagttaccaatgtaatatggttgggtgacggaatagaaggagatgatacacacggacatatcgacgatttatgccgatttgtaaacgaagatactattgtaacgattgtagaaacggataaaaacgattctaattataaaccattacaggacaatttgaaacgtttgcaaaatgcaaaactggaagacggaaaatcaccaactatcgtagcattgccaatgcctaaacgtgttgattttgatacgttaagattaccagccagctatgcgaattttctaattttgaataattgtgtactggttcctacttttaacgatagcaatgatcgtgtagctttgaatatacttgctgaatgttttcctgacagagaagtaatcggtatcagttgtattgattttatctggggctttggaacattacactgtttgagtcaacagattccggcttaatttttagatttcgaaggatatcgaatttttttgccacagattaaaggattctcgcagattataaaaaatcagtttttaatcctttaatctgtggcaaaaagaataaaaaaaaccttgttagtcagctaacaagttttttttgcttatatatcttccgatactgcaggatctcttcattgtctcacaaaaggaggtaataactggcttgaaacttctccaaaaccaatacgtacttcattgctttcgcagaaacctctgatgattactgtgtctccatcttctataaatttacgctcaccaccaccattcaaggctattgggttttttcctccccaggttagttctaacatcgagccaaagctgtcttcagttggaccggaaatagttcctgaacccatcatatcaccagagtttacacgacatccgttggatgtatgatgtgttaactgctgtgccatagaccagtacatgtatttgaagtttgatcttgaaagtacggtttcttcttgattttcaggttttaaagcaacctctaaatgaatatcgtacgcttttttgccctttgtttgtaaatagggaagcggagtgggatcttgtttagggcctttagttctaaaaggttctaaagcatccattgtaataatccatggagagattgaagaagcaaagttcttagctaaaaatggtccaagtggtacatattcccacttttgaatgtcacgtgcgctccaatcgtttaataaaaccattccgaaaatatagtcctctgcttcgtaagttgaaatgttttcgcccattacatttacatctgtagtaatgaaagcggtttctaattcaaagtctactaaacgggatgctccaaataccggggtatcatgtcctgcaggcaaagtttgtcccatcgggcggtgtaccggaattcctgatggaactatggtagaacttcttccgtggtatcctaccggaatgtgtaaccagtttggcaataaagcgttttcaggatcacggaacatttttccaacgttcgttgcgtgttctttactggaatagaaatccgtataatcaccaattaaaactggtaattgcatttcgacatcatcaatattgaaaataacaatatcgcggtctttcttcgaatctcttaattgcggattggtttcgtcgaaaatatcagcaatacggttacggactaatctccatgttatttttccataagaaatgaaatcattaagagtgtcctgcatgaacatatcatcagtcagatctattcctgcaaagtagtttaattgttgtagagcccctaagtctatagcgtaatcgccaattcttgttcctacagtaacaacattttctttggtaagaaagataccgaatggaatattttgaatagggaaatcactattttcaggtacttctaaccatgattttctcttagtatcgttagcggttattggcatgtgaatgttaattatttgttgaaaaattctatgtcaaatatatcataatctaacagtttgacaaacgtttttttgtatttttgcaggaaattaacgaaaaacgaaaaaatgcaacgcgacgaacaaatttttgaccttatactagaagaaaaggacagacaaattcacggattagaacttatcgcttcagaaaattttgtaagtgatgaggtaatgaaagcagctggttctgttttaactaacaaatatgccgagggttaccctggcaaaagatactacggaggatgcgaagtagtagacgtaattgagcaaattgccattgacagagccaaagaattatttggagctgaatatgcaaacgttcaaccacactctggatctcaggctaatacatcagtttaccatgcatgtttaaatcctggagatactattttaggtttcgacttatctcacggaggtcacttaactcacggttctcctgtaaatttctcaggtcgtttgtaccgtcctgttttttatggtgtagatgctgaaactggtcgtttagactatgataaaattcaggaaattgccactaaagaacaaccaaaattaatcattgcaggagcttcggcttattcacgtgatatggattttgcacgtttcagacaaattgcagacagcgtaggagctatcttgtttgctgatatttctcatcctgcaggtcttatcgctaaaggattgatgaatgacccgattccacattgtcatattgtttctacaactactcataaaacattacgcggaccacgtggaggtttaatcttgatggggaaagatttcgaaaacccacaaggtttaaaaactccaaaaggagaaatcagaatgatgtcttctttattagatcttgctgttttccctggaaatcaaggtggacctttaatgcacatcattgcagctaaagcagtagcttttggtgaagcacttaaagatgatttctttacttatgctatgcaattgcagaaaaatgcaagcgctatggctgatgctttcgtaaaaagaggatacaacattatttctggcggaacagataaccatatgatgcttatcgacttaaggaataaaggtatttctggtaaagaagctgaaaatgcattagtaaaagcagaaattacagtaaataaaaacatggttccatttgatgataaatcaccatttgtgacttcaggaatccgtatcggaacagctgcaatcacaactcgtggtttagtggaagaagatatggaaacgattgttgctttaattgataaagtgcttgtggatcatacaaacgaagcagttatcgaagccgtagcagatgaagtaaatgaaatgatgagcgaaagaccaattttcgtatactaaaaattagtcataaagtcataaggtcgaaggtcgaaagtcttgaaatggaatgcgaatttctattttaattcttgatcttcgacttttttgactttacaactttatgacttttaactttaagacttaaaaaatgggcgtactaagattacaactgccaacagacccaagatgggtcaatattgtagagaaaaatattgaagaaatcctgacggatcacgcttggtgcgagcagaaagcagcaacaaatgcgattacgattattactaataattctgaacatcaggatttagtgcaggatttattggctttagccaaagaagaaatcgatcattttgagcaggttcataacattatcattaaaagaggattgaagcttggacgtgagcgtaaagacgattacgtaaacgaactgtatcagtacatgaagaaaagtggagacggaagccgtgtttccggactggttgaaagactgttgttttctgcgatgatcgaggccagaagctgtgagcgtttcaaggtgctttctgaaaatattcaggacgaagaactggccgttttttacagagagttaatggaaagcgaagccggacattacactacttttatcacctatgcccgaaagtacggcgttggaattgacgtagaaaaacgctggagagagtggctggctttcgaagaatcaattattaccaattacggaaaaggagaaactattcacgggtaacgtttacagtttatagtttttactttgcagtgagcggtatttagtattcagttcacatctaacattttacatctaatatttcaccattcacaatccgtaattcactatatttgagagccactaaaacggaaacgtatgagaatagaagctgatttaaaactgggatttaaagatgtaatgattcgtccaaagagatcaacgctaaaaagcagatctgaagtttctttaaaacaagattttaagtttttgcacagtacttcgtcctggtccggagttccaattatggcggcgaatatggatacggtaggaacttttgaaatggccagagttctagcgaaagaaaaactttttacagccattcataaacactactctccacaagaatggaaggtgtttttaaaagataagacaactgatttttatgatcatattgcgatcagtacgggaacagggacagaagattttgaaaaaataagccggattattacagagaatccattgcttaaatttatttgtatcgatgttgcaaatggctactcagaacattttgtgcagtttttgaagcaaactcgcaaacaatatccagacaaagttataattgctggaaatgtagttacgggagaaatggttgaagaactacttttggctggtgctgatatagtaaaagtaggaattggtggtggttctgtttgtactacccgtgtaaaaacaggcgtagggtatccacagctttcggctattattgaatgtgccgatgctgctcacggtttaggcggacatattattagtgatggcggctgtaagacaccgggagatgtggcaaaagcatttggtgcaggatcggattttgtaatgttaggcggaatgttggcaggacatacagaaagtggcggcgaagtgattgaaaaaaagggacagaaattcaagcagttttacggaatgagttctaaaacagctatggagaaacatgttgggggagtggctgagtaccgggcaagtgaaggtaaaacagtgcaggtaccttttaagggtgaggttataaatacaatattagatattttgggaggtttacgaagtacttgtacctatgtaggggcttcgcgtctaaaggaacttaccaaacgaactacctttattagggtaagtgaacaggaaaatcaagtttttacaaaataataaaagcattttaaaatagaatatgattgcaatttcagaagctacagttagcgatattaaacaaattcaaaaaatagtacatataacatggccgattacatacggtgaaatcttaaccaaagaacaattagattatatgttggatcttttttactctgatgaagctttggctgatcagttagaaaaaaaagagcagttgttttatatgattgaggatgatatgaccactatagggtttatcggaattgaacacaattataaagagaaagcagcaaccaaaattcataaaatttaccttttgccggaaactcagggaaaaggaattggtaaaaaagtgattgaagaaattgaaaggcttggggcagtacacaattctcaggcattatccctaaatgtgaaccgatttaatacggctctgggtttttacaaaaagataggttttgaaattgttggagaatccgatcttgatattggaaacggttacttgatggaagattatgtgatggagaagaagttctagaattgagtcatatatttttttggaagtgagatgtaagttgtgaactgtaaaatgtaaactgttagatgtgaactgagattgagaactgagactgagaactgagactgagaactgagactgtaaatagaaaactaccactttaactcacaatcacatcatgcttgaataacaatccttttacttcattcaaagcaaaaactgcttttttcagtttagtttttgagggatcaatagtgtaattgtagctggttttgaaatcggctttattggcgatggctttgttaaattcagagcgatacaaatcgcaattctcaaacaggacgctggtgaggtcggtagccataaaatctacagcaattaaactacaattcgtaaaagtggttcctttgatctttaaagtgtaaaattttgaaaaatccaaaatgcaatcgtaaaaatgaatttcaaagatcagtttgtcgcacatggcaaaattaacgtctttaatttcgcagcgattaaaagtggcagttcgaaaggcaacatagttaattttagcttcgctgaaaatacaatcgttgaaaacacaatcgatgaaagtaacggctaaaaaggtacaggcagaaaaattacaattgttaaaaacacaacattcaaaatctttaaaattgacatcctctttaccataaataatggtatcgtattctttatcaaggaaatattgagattcttttttcaaggtgatttttaaagataattttcagaccgaaaagatactaattatacgagtactagcagacgataaataaagataattttcgatcccgaaggtgactttcggatggaatagaaaaggaggttaagaccttttgcctgatgcagttaaggagctctgtttagaggtgtttttttgtgaatttgacattttttgatccttaaaatgttaagtacttaattttagaggtaaaatttaagaaaatcttagcagtatttgatttgaaatattttcctatgagggtaatttgatgtagatttacactgttttttaaagttaaaacgtaataatttaaattatatgggatcaacaagaaaagagcatgattttttaggggaattagacattccaaatcatctatattatggtatccaaaccttcagagcagtagagaattttaatatcacaggaattcctatttcaaaagaacctttattcatcaaagcattaggttatgtaaaaaaagcggcagctttggctaacaaagattgtggcgcattagatgctaaaatagcagaagcaatttgttatggaagtgatcaggtaattgctggtaaatttgatcaggaatttgtaagtgatttgattcagggtggagccggaacttcggtaaacatgaacgctaacgaagtaatcgctaatattggtttagaatatttaggacataaaaaaggagattataacttcttacacccaaacaaccacgtaaactgttctcagtctactaatgacgcctatccatcagcttttagaattgcactttatctgaaaatagaaagttttattaaaactttagaaggtcttgaagtagcatttgctgcaaaaggagaagagttcaaaagtgttctgaaaatgggaagaacacaattgcaggatgctgttcctatgactttagggcaggagtttaactcttatgctaccactattggagaagatgttagaagattaagagatgctcagagtttggttttggagatcaatatgggagcaacagctatcggaacaagagtaaacgcaccggaaggataccctgaaatttgcgtaaactacttagcaaaagaagttggaattccgttaaccctttctcctgatttaattgaagctaccgtagataccggagcttatgttcaaatcatgggaacattgaaaagaacggccgttaaaatttctaaaatctgtaacgatttaagattgttgagctcaggaccaagaacaggatttaacgagatcaatctgcctgcacgtcagccgggatcttctatcatgccagggaaagtaaatccggtaattccggaagtcgtaaaccagacttgtttttatgtaatcggacaggatttgactgtaactatggcagccgaagcgggacaattacaattgaatgtgatggagccggtaattgctttcgcgatgtttacttcattggattatctttcaaatgcaattcagaccttaattgataaatgtatcattggaatcactgcaaatgaagatcactgttacaatatggtcatgaatagtattggaatcgtgactcagctaaacccaattttaggttatgaagaaagtgccagtattgcgggtgaagctttaaaattgaacaaaagtgtacatcagattgccgtgatcgaaagaaaattaatcactcaggaaaaatgggacgaaatttattcattggataatttaatcaacccaaaattcattacaaaataggagagtttctctctagttatagaaagccgacattatttttagtgtcggctttttttatggtaaaattataagttaagatttatgtgaaagacctgtttttgatcaaattctaatttgtcgataacagtgattaagggaatctttttaagttcgtcaaacgatagaaattatgttatgcgcaacgatcaaatattgttgcgcttttttttgattaaaattataggtaaagaaatttccattttctgagagcataagctttacctaatacagttcttattttttatacttacaaatgtgtaatgttatgatccatttattacatcaatattatcgcttattgaatttagcactgattgtttgttttatcttcataatttctatcaaaatttagcgggatactgtaaggcctgaaaaaaacttacaaataagaatactgggtttagtaacagaacctaagatatacaaaatactgaaccaaagcagcttatggaaaagtacaagccaattatctgtctgttattagtaacaagtttgagtataaaagcccaaacccttagcaatgaaaactttatatacaccctgacacctaaaaaaccggttaaagcagcaaatctaagcacgcttaccaaggacgaaatgagtcagactgtaacctattttgacggattaggccgtccgatacaaaccattgccatcggtcagggaacaggagacaaagacattgtaacccctatcgggtatgatgactttgggcgacaagtcaaagaatacctgccgtatgcagtggacaatggaagcaacagttaccccatgatcgacccgaaagcagccataagtgcagcaaccatcttttatggtaaatcggaatacgataatacctcaaatcctttctctcaaaaagcatttgaaccatcaccattgagccgcgttttaaaacaagccgctccgggagcttcgtgggaaatgggcaaaggccgtgaaattaaaatcgattaccagaccaataccgatgtggatgcggtaaaactctataaagccaatactacttgggacgcaggtttaggattgtacgacattagttttaatgatgcaggaatctatgcggaaggaagactctataaaacgattacgcacgatgaaaatacaactgcaaccccaagcgaaagtgccggttcgacggtagaatttaaaaataccgaagggcaggttatcttaaaaagaacctacaattcaggcaatccacatgatacgtactacgtttacgatatttatgggaatctgacctatgtactgcccccaaaagtatcgggggcagttagtgatgagattttaaacggcttgtgttaccagtacaaatacgactaccgcaatcgtctggtagagaaaaaattgcccggaaaacaatgggagtttgtagtgtacgacaaactcgatcgtcctgtggcaaccggaccggctttttcgccttttaaagatgaaacgactgaaggctggctcattaccaaatacgatgcctttagcagacccatttatacgggctggagcagtcaaacctcaaattcagctactagaaaggcattacaggatgcccaaaataccgctgccgttttatttgaaacgaaacaaagttcaggaaccatagacgatataccggtatactacagcaataacattgctccaacgaactttaaacttttaaccgttacctattacgacaattataattatcctaatgcagctgttaagcctacaactattgaagatcagaccgttttagacaatgccaaaggtctggtaaccggaagctggacaagagccctaactactgcctcagaaacatcaggagaaaccaccactaccttttacgatcgaaaagccagagcagtgagtacccgaactcagaattatttaagcggttataccaataccaacagcaaactagattttattggaaagtcactctataccatcacgaaacacaaacgtacctcaggagatgccgagctcatcataagagaagaatacacctattcgcctcaggaccgtttgctgacgcacacccatcaaatcaatggcggaacagtagaacttttggcagataacacttatgatgacttaggacaattgatcgttaaaaatgtagggaacagcgcgacaaatcctttacagaaagtacattatagttacaacattagaggctggcttaccggaatcaacaatgtggaaaacctacagcaagatacggacccggtggatttgtttgcctttaagataaactatgacaaacaaccgggcaactcacaggttcaggctttgtacaacggaaatatttcagagacctattggaagaccaacaccgatcttaccaagcgttcctatgggtatcagtacgacaatctgaatcgtttaaccagtgcaatttacagtaaacccaatgatgctattccgatttcaggggcctataacgaaagtttgagttatgataaaaacggaaacattaaatctttgcagcgatatggaaccagtgatgcaccgtctattgtttttcaaacagatgatttgacttatggttatttgaatgaaaactccaatcaactaaccaaagtaactgacggtactgccggaaatgacaatgagggttttatagatgctaataaaatcggggatgattttacctatgatgccaatggaaatatgattaccgataaaaacaaaaacattacttctatcacttacaaccacttgaatttacctctaaaaattacctttgcgaccaccggaaatattgagtacatttacaatgccaatggcttaaaactaagtaaaacggttaataaaggcacttgcatcactaccattacagactatttaggaggatttcaatatgaaagtatggccaacaaatgcacaagggcaggaagtggatataccggagttttgaagtttttcccaactgctgaaggttatgtagagccttccacaggttcttataaatatgtgtatcaatacaaagatcacttaggtaacatacgattgagttatactaaaaatccggcaacccaagttcttaccattattgacgagaataattattatccttttggattgaaacacaaggggtataatgattatgtagctacgagtaataagtataagtacaacggtaaagagtttcaagacgagctggggcttaacatgtacgactatggagcaaggaattatgatcctgcgattgggagatggatgaatatggattctaaaactgaagcttattatccgatatcaccataccagtatgtacttaataaccctgttgttaatattgatgttaaaggagaatggacagttacgagacactataatttgacttataattcacttgccgcagctggaataggaaaagtacaagctaatttattagcgcattatgcatcagtatatgcagataatccaggaagccacataaatgcaaataatatggcacatccaactaatcagaaattttattcgccatatattgattattcgggtacttcaaattcgcaggttaccgattatacaggtaaaggatataattataatatttggcattctatgcgttcagaatgggaagaagacaataatacaatttcggctcatgatgcaaccgaaagggggatggaatttggatgggacaaaattttccaatcaaccgaagaaggacaacttaaggatttaaaagcaaatagtaaaggaattgaagcttttggacaaggtgtacacgcgctacaagatgcgtatgcacataaaggacgttcagatgttggtgtagggcatttgtggaatgatagatatggcgatacatcaggtgcacaaagaatttcggactcagcaattacggttcacaatattatgtctggtaattggaaagcttttgaaggtaaagaagaaataaaatttgatgcaaatggtatgactaagaatcaatttgtaaaagtaatggaacaaattaataaatatttaaatcagtaaaattatgacgaaattaattaggatttttagtgtactattaataatattctcattaggaatgattattttatttggtgcttcaggtcataaattcgacttgaataaacatgataatcaagtttatctactctttatcctcttgtacttgtcatcagcaattgttttgtttttttctttatataaagaaagtctaataatgaaaagaattgcagttactcttttattcttgattttgatttcattcatatatttattttatgagatagtttcaattacaataggcgatttttccgcgataataccaataatttttagtttagttattatatatatggatataaagattttgtcaattctaattagtagtaatcctaatgtctagtcctgaaatagcggtaaacaaaaattgcctttgcaagccctagatcaattgagtatatttacaacgcagcgggtcaaaatctgaagaaaattgtaaaagaggccagcggtacaactcatgctgattatctgggaggatttcagtacaggtatagcgaagaccaaagtattccggttgatccggttggtccaggcggtggagatccagatcctcctgcacctgatgattcaggaaatccgaaagacccaatcgatgggttcgacccggttcctaaagatccaccggtaaaagccaatcgttttagtgccttcgcagcgtaatcggcaagtcaggctgctccgtcgcgaccaacgttagaattcttctctacagcagaaggctattatgataacataggtaaaaagtatgtctatcagtataaggatcatttgggtaacatcaggttgagttatgctaagaatccggttcactcttcactcttcactcttcactcttcactcttcactcttcactcttcactcttcactcttcactcttcactctatgttctagaaaaaaaactacttaaaattagaaattccttctttcagccattgcaaatattcttctgcgcttacataactaatagtaggtttagaattgtttaaattcttcccttctaaatcggttatcacatataatggctgcgtattggttttatattttgaaatcataaaatcggtccatttatctcctaccgtttcaattttgtctccttttgctgtaacatactgctcttcttttggcaggtcacgtttatcatccacataaagagaaatcaaaaccacctcatttttcaggattggtaaaatcatgggttctgaccatacattgttttccatttttcggcaattcacacaagcataacctgtaaaatcaagcataatgggtttgttgattgattttgcatacgctaaaccatcttcgtagtcatgaaaaaccataataccgtgaggacctaactctgctcctgccggtaaacctgaaacggtttcagtactaccgctatttgaatttgcagatccccctaccccaaacggactttcgctatattgtggtggtggcgggaatgcactgattaattttaatggcgctccccaaagtcccggaattaaataaaccgtaaatactaatgtaagcaatcctaaatacaatcttccaaccgaaatatgatttagaggactatcgtgaggcaatgtaatttttccgaataaatataacgtcagagctgcaaaaatagcgatccagattgcgatgaatacttctctttccaaaaagtgcaactgaagcaccaaatcagcattagataaaaatttaaatgctaatgccaattccaggaatcctaaaactacttttacagtgttcagccagccaccggattttggcaacgaatttaaccagcctgggaacatagcaaagaacataaatggcagtgccaatgcgagtgagaatcctaacattccaacaacaggagcaattccaccatttgaagcagcttctaccaataaggttccaacaataggtccggtacaagaaaacgacactatagccaaagccagagccataaacaatataccaattaaacctcctctgtcggcctgctgatctgctttattcgcccatgaattaggcagcataatttcgaaagctcctaaaaatgaagtagcaaaaataatcaggatcacaaagaaaatcaggttaaaccaaacatctgtagatagtgcattcagcgcatctgccccaaaaattttggttacaatcaatcctaatactacataaatagcaataatagaaaaaccataaatgatagcatttcgtattcctttagccctgcttttactttgtttggtaaaaaaacttaccgtcattgggatcatcggaaaaacacaaggagtcaacaaagctgcaaatcctgaaataaaagcaataaaaaagatcgaccataaacttcttgatggtgctggtttctttacatgatctacaacttccgctgttgcgtgatcaattttcttcagttctaatttttccgaaacagctgttttactcaccgtatcaacagctaaatcagccattttagtctcatccggtttcgattctgttactactgcaacggcatccattttaaaatttgatggaatcgctatagaaaactttttactggaattgatacaaacttctttacaaacctgaaagtcaaaatcaacctcaaccgtctttaaatttgggttaataattgtgatctcttgttcgatatgtgctttgccttcaaagaaagtttcatttacaccaaagacatcattaaaagctgttttggtttttccttctttagcctttccaaccaaattgtaatttcctttctgatttttaaaggtaatctctaaagcaagtggtccaccttcaggtgtaaactgcgaatacatgtgccactctttttcaattgttccgtcaaaaatcaaaacagcattattaccggctctcttttcgatttttgaagtccattttaccggttcgagaatttgagcattcccttttgcaaatgcaaaaagaaaaaacaataaaaaaacaatggatttattccagacacttttcgatattatcgtttgttggtagtagttagggttcattataataattctattttaattatttcgtttgttgtattctcaattttaaagcgttcatcctgtctgattccaataacccacacaatctgattatctgagcataaaatccaaattttctccttttcaatcagcgataatttttcatctttaaaaagtttgcttagctttttagatttcccattcattccaaaaggatgaaaaacatctccctccttccatttacgcaaaataagtgggaaacggattttttcagcgtccacaaatatagctttatttgaatctattgtaatgtcgtctacctgacaaagccttaattttaagggaaaattaacgtctttctcctctgctctaatttcgaatacttcattttcttctaattcagaaattggactcaaaatcaaagtatctctgtttttcaacaatcgaaaatcagccgaaaaaacctgtttaccggattgtccctctaccaaatcataaatatcattccaggctacgaaaccaaattcatttagccactgatacaaatacgatttataattgggtaatttcctgagctgattcaaatcaaagtgaatgtcttctccctcttctttcgccacttgctggtaaatcatgatcgaagcatcctcaaccatttcctgagattcctgcaaatatccctgcgttttctgaaaggcatttaaaaaatttggattgatttctttcaagatcgggacaagatcgtgacggattttatttcgcaggtatttgtttgatgcattactgctgtcttcgcgccacgatatattattttgttgggcatagtctaaaatttcggctctggaaaagggcaaaagcggacgaacaattttatcattttgctccggaatcccaatcagtccgtctaatcctgtccctcgggttagattgattatgaaagtttcgagattgtcgtcggcatgatgtgccgttaaaatatagtcgaaattttcggtttccagaagttcgtaaaaccagttgtaacgcagttcccgggccgcaacctgagtggataatttataatctttggcaaaagcctcggtatcaaattgagtactaaaaatcgaaatatcattctcgtcacagtacttttgaataaaatcctgatctccaaaactttctactccacgcaattgaaaattacagtgtaaaacggcgatctcaaacggcaattgttgaaacaaatgcagtaaaaccatgctatccaatcctccgcttactgccagaaacagctttttatcctccagaaatggaaatcttacagcgagatgattttgaaattttgaaagcatttataaatgtaaaaatttaattctatatatatggagaaagtttttaaatcttaaaattgtacgaatttacactatatttacgaattgcaaataaaattgcacgaattttaattaatttaacgcattgagtgtaatttattttaacacatagaaacatagctttaatactttcaaaaaagacgtttcacttatttaaaacacacagagactactatgtataagaaacatgtttctttttatagacctaaaacctatgtttctatgtgttacgtttttttactaattataccaaacaagttaatttaattttatcatctacgattcattaatcgaaaatacattggttattgcaaaacttcgtgcatagcttttgcctttaacaaacattcttcatactctttttcaggaatcgattgggaagtaatcgcacttccgaccgaaaacgaaatatatttattttcctgattgtacaaaatacttcttatcaccacattaaaatcgaaatcaccttcaggcgtgaaataaccaactgcaccactgtacagacctcgtttggtttcttccagattttcgataatcttcatgactgaaatttttggtgctcccgtcatgcttcccattggaaaagtagttcttaaaacatctatcggtgaatactgcggatctatttttgaggtgatggttgagatcatttggtgcacctgtaaaaatgagtaaattttacaaagttccgttacttcaatagcacctttctgtgctgtatgcgacagatcattccgcaccaaatcggtaatcataatattctcagcccgttctttaggatctgatgctaaaaattgttttgatttttcgtcttcaaccggatctgaaaatcgttttgaagttccttttatcggttgagaaattaaagtttcaccaacctttttcaggtaccgctccggagaagccgaaagcaaatattgtttatgattcttaaaaaataccgaaaacggagcttgtgatatcgcatctaatttctggaatttttccaacggattaatttcggtattctcagcgaaaaattccatgcaaaaattagcctcatacatatcacctatatgaatgtgctccagcattttgttcactttttcaacgtaagcctcttttgaaatacgctgtttgacttcaatcgcgcttaccgtttcaaaggcatcatatttactagtaacgatttcttcataatcctcttccagctcatcatcgcaaagcaataaatattgtatttcgagtttattttcttttaacgtaaaaatctttttaggctgaaagaaaaacaaatccggaaaatctaaaccgtcaaaatttgatgatgtgagattttctgtatcgttttttaaatcataggaaagatatccaaaaagccagtctttagtcgtttgctgatattgtttcagatcttcaaaagcattatgaaaatctgtttttaaagaggtaaaagcatccactgccaaaacaaaatcaaagcttgaatattcctgtggataggaattactatccaaaaaaacaacctcccgaaattgttgtgaccagcttaaaagctgttgtttaaaatgctctggatctgaaatgtctttgtaaatggtaactctcaaaaataggtaaattttaggcctcaaaattacaacaaaaaaaatccttcaataaaatattaaacaaaaaatattggcacactttttagtatatcgaattaacaagaatactcaaactttttttgcctattgataaaatacacttctaaaaaacacagccagtaatgactaatacagattgaattcgttatacccaaaaatcgataacaatctttctagtctcccccttaaaaacggattctctaaattattactcaacgcattaaatctaaaaaactttatgaaaacaattgccaaccttggattgacttccttagtgcttatcctcttattcttttcctgcaaaaaattcgatcccgctacatcagaaagccttgaagaccaaaaaactacaacagacagcactgcgatttcttcatcggcagcagtggaaaaaaaagacggtaagcaaaaattcattcgcactgccgatattaaatttaaggtaaaaaacgtcgttaaatctacttatgcaattgaaaacaccactcagaaatttggaggttttgtaacctacaccagcttacaaagcaccattcgtgatcaggttaaaaccaaaatcagtcccgacagcacactcgaaaccactaaatatacggtacaaaacgacattacaatccgtgttcccaatacacagctcgatactgttattaaaatcatagccaaacaaattgattttctggacttcagacttatcaaagccgatgatgtttctttaaagttattatccaatcagctttcacaaaaaagaagcactgttacacaaaaaagagtcgaaaaagcaattgatactaaaggcaaaaaaatcaatgatgttatggaagctgaaaatgcgctggcgaaccagaaagaagccaatgataacagcattattgagaatttatccttagaagatcaaatcaacttcagtaccataactttacagctgtatcaaaacgaaacaataaaacaagagataatagccagtgaaaaagacagtgatgcttataagcccaacctaggcattcaaatcatcgattcgctaaaaaatggctggtacattcttgaaacgatctttgtttttctaattaatttgtggccatttcttttgattggttttggaggatttttcctttacaaaaaatactttaagaaataagaaaagtgttaaaaaacaacaatttcataagaaaaaaatcgttatatttgatatagcattctatttatctcaaaatagaacaataatgactgtcaaattctcaatataaaagtcatgaaaattactttttatcattggtgagttcagattataacgttttccaaaaataaattagacttttttaacccattaaaattcttaagtattatgaaaattgctaccattattgtccgtgttttaattggccttttgttattattcgcttctcttagttttttcttcaaactggctccggaaccagaaactaccggtgattttaaagcttttaatatggggctagttgcctcaacttatttattgccattagcaaaatcaatcgaactactttgcggaattgcgtttgtaacaggacgatatgtaacactagccaatatactgatcttacccattacggtaaacattttgtttattaattattttctaaatccaaatggtttaccattggccgttttattatttcttgccaatctgtttttaatctacagatattgggataattacaaaagcattttcaccagataatcaatttttcactgtacacttaaaaagcaaatccgacagttttaaaaacctgtcggatttgcttttttttactacttacactattttgctttacaactggaataaaaaggaccaaaaatgaaaccttaagcataccaatattatcttttctgataaagctggcttttcccgatactttcctctcactcgtcttttatgacattatagcccctgttatttacctttatcactatattactacttaagaatagtaacaaccactatttagaatctgctctgacaactttaatttatttactaaaaactttagcagttcaaaactaagttttttttgaattcttcagtgcttacaaaacaaagtattgctacaattcttcagcatctgcaaaacaaaactataaacatgattaccaaataattaaaccctgaacacctacaaatacagcctcagaatcatacctctaatttacgaaatttttcctaaacttcttcatttttagactcaaatattacaagaataaaatccaattctccaaaaacttttactaaacaattatatttgatgaaaatttccattttacatgaaaaaatatctactcctcttcttattattatttgtccatttttcgagatcgcaatctataaaatctgtagattcgctaacgaccgaaatctgtaaatcattggttcaaaatcaggctttagacaatgaaatcagaattaataccatcaacaattcgcatatcgccccttatctgacaaaatttaaggacagtattgtacaaagaagagtgtttgagcagctatttttcaggttacataaaaactgtaacgaatttgtagctctttttccaaacgaatctgagaaaagcagctggtccatgcagaatgaaaagcctcttgatgaaatatccagagaggaatgcaatcattttgatcaatcttcaaaatattattacatagaaaatagcggtgcaaaagtagcggtaactttaagcgatcatttatggattgaaaattttaccgatggtacattctcaaaattgcattacagaaaaaaaggcagttgtgaatttgaactggaatttattgaaagtaataatctgtcgcgaaagaacttaagcattaaaggcgacaaatatttgtatcatctgtataaagaagagaatggaacttataatgtctatttaaagaataaagaaacgtattatacttttaccctattaaggcaataaaaaacccgtcagaaataattctgacgggctcttaagatatattttccgtaaattatacgtgtaatgctctgttatcagtagctgccaaagccgcttcttttattgcttcagcaaaagttggatgcgcatggctcattcttgagatatcttcagcagaagctttaaattccatagctgtaaccgcttcggcgattaaatctgctgtacgggctccaatcatgtgaacacctaaaacctcgtctgttttttcatcagcaaggatttttacgaatccatctaagtcagcacttgctcttgcacgtcctaaagctttgaatgggaaacttcctgatttgtatttaactcctgcagctttcaattgctcttcagtttgtccaactgctgcaacttctggccaagtgtataccacaccagggattaagttgtaatcgatatgtggtttttgacctgctaagatctcagcaaccatagttccttcttcttccgctttgtgtgccaacattgctccacgaacaacgtcaccgatagcgtagatatttggaacgttagtttgtaaatgatcgtttacttctacttgtcctctatcagaaatttttactcctgctttgtcagcgttcaatccgtctgtatacggacgacgtccaacagaaactaatgaataatctccttctaaagtgattgtttctccttttgcattttcagcctgaaccacaacagcatcaccgtttctttctacagattttactttgtgagaaacgtagaatttcattccttgttttttcaatactttagtcaattctttagacaaagaactatccattcccggaatgattctgtccatgaattctacaacagaaacctgagcacctaaacgaaggtaaacttgtccaagctcaattccgattactccaccaccaataattactaagtgttttggaacttcttttaaagccaaagcctcagtagaagtgatgattctttctttatcaattttaatgaaaggcaaagaagatggttttgaacctgtagcaattatagtatattttgcttcaatagtttcggaagttccgtcagcttttgtcacagcaatgtgcgttgcatctacgaaagaacctaaaccattaaaaacagtaactttatttttatccattaagtagtttaccccacctgcagtttgatctacaacagcttgcttgcgtgcgatcattttctctaaattgattttcacatcacctgaaacttcgattccgtgatctgcaaaatgtgcaatttccgcataatgatgagaagacgataataatgcttttgaaggaatacaacctacgttaaggcaagttccacctaaagagttatacttttctacaattgcagttttaaatcccaattgtgcgcaacgaattgctgatacatatccgccaggacctgaacctataatgactacgtcaaatgaactcatagtttgtctattttatttttagcgttacaaaattaaggaataaagttttgtttgaagtttaattttcaatgttttttgggtgaaattttagatggagttttaaccgttaagagcactaagatttacgctaagttcgcagagattagctgtttttgggtttgtgataaatcttacttttatatattttaaagacacacaaaaacaaaaaacactgataatcagacaacaaaaaacataagccaaaaaaaataaaatgtaaatttgaaatctaatcaatgctaattcaaaatggaaaaactacaattcaaaatagagataaatgcaacggctcaaaaagtttatgaggcgatgctgggtttgaaagataaaaacacctatgaacattggacagcagcatttaatccaacttctacctatgaaggaagctgggaaaaaggcagtaaaatttattttgtaggcctggatgaaaacggaaaaaagggcggaatggtttctgaaattgtagaaaaccaacccgctgaatttatatctataagacattacggtttcctggatggcgaaactgaaattactacaggggaacaagttgaaaaatggactggcggacatgaaaattattcctatcaggaaaataacggtataactactgtcactgtagatctggatacagtagacgaatacttagattattttacaagtacctatccaacggcattaaacaaactaaaagaaatttcagagcgataatttccttaaataatactattaaaaaaactaagcaccttagcctcttagaatcttagcaccttaaaaagaaatcaccgttgagttcttcgcttcactaatcataaacatactttgtgtgctgccaatatgttgaagcgaagtcagttttgtggcctagattacacaaattctctcgaagtttttttgtctctcgctgattttgcagatcatgctgattttgtaattcttataaaatcgcgaaaaaagtaaagatttatcgcatttttgacgcacagctgtacatttttaaggaaaacctttgttcctttgaatctttacaccaaaaactcagaaccttaacaacttatatccttagcacctttaaagaaaacctttgcctctctgaaactttagatgccgaattaaggctttttcttaggatttctggaagtgtggaaaacagagtaaacgattatttcatttccaataatttcataaataattacaaatggaaattttaccaaagttaattcacgataaccaggttctttttttatttgaaataattccggatgtgtttttaaaacctgtagatatgtttttaagtaggatagaaattgctttcctaaacctttgctcctactttcatagaattcaatagctttatcaatttcattttcagctaagggtaaaattttaattttgaaaaccatacttagcattcaaacgttgttctacttcttcccaggaactcgcttcattctcctgtgaaagatacttttctctttcttcagcaacaagatcataatgagaatcaggaacaagtgattctttttcatcatgatttatcgcatcaaaaacactttccagaatttctaatttagaatcatcttttatgaatttcccaaaatcctttataagtctaagtcttaattcttttgtttccatgctaaaatctatttgattcaaatttaagcttttttcgcttttgaatttgaatcacaatccaaaaacttagcctctcagaatccaagcccttaaaaagaaatcactgttgagttcttcacttcgctaatcataaacatgctttgcgtgctgccaatatgttgaagcgaagtcagttttgtgaccaggaactcacgatacgcttccatgtcttttaccaaaacttttaagatataatcataatcaccgcttacgtggtggcattccagcacttcgtttaacttggtgacttcactttcaaatttggttaggaattccttagtatgctgaatcagttttaaatgacagaaaaccacaaatcctttttcgattttagatttattcactagagcaacgtagtttttaatgatgccttcacgctccagctttttaatcctctcataaaccgccgtcacagagagattgagttttaaagataattctttattcgtttttttactgtcggtttgtaataaaaccaggagttttttatctgtggcatctaaagtcatggcttcagttttagggtttatggtttatagttcatagttgatggtttatagtttgttcttattgctgtaaaatgaaagaaaatctattaactgatcttgccttcatcaaatttagattaaaaatcaggataaatacatttttgtagttttaaaatctaattattcatttcgtgattgattaattttccaattagctcttaatttgaaaaagatttccttcaaaaaagaagatacgaggttcatattagaagtaaaaatcaaaatagcagtctcaaaaaaccacaaaccacaaaccacaaactataaactataaaccatgaaccactttaacccggcagacaaaattcaggatttgcaatactttggtgaatttggcggtgtaaatccatcgatttccgattcttctacttatacttttctttcagccaaaaccatgttcgatacttttgaggggaacatggaaggttgctacttatattcccgtcattcttctccaagtaatctgtatctggatcaggcactggcagcgatggaaggaacagaaaccgccaatgtctcggcttccggaatgggggctatcactcctaccctgctacaactttgtggtgcgggtgatcatattgtctcaagtagaactatttatggcggaacgtatgccttcctaaagaatttcattcctcgctttggaatcgaaacgagctttgtggacattaccaaacttgacattgtagaagcggcaatcacctctaaaactaaggtcctatactgcgaaacggttagcaatccgctattagaagtagctgatatcgccggactgtctaaaattgccaaaaaatacaatctaaaattggtggtagacaatacgttttcacctttatcggtttctcctgcaaaattaggggccgacattgtgattcatagtttaaccaaatatataaacggaagcagtgatactgttggtggtgtaacctgtgcttcgaaagagtttatcaattcgctaaaaaatgtaaattcaggcgccagtatgttattaggacctacaatggacagtctgcgttcggcttctgtgatgaaaaaccttcgtacgcttcatattcgtatcaaacagcacagtcataatgcacacgttttggctgataaattcgagaaagacggtttaaaaacggtttatccgggattaaaaagccatccaagtcatgaattgtacaaaacaatgattaatccggaatatggttttggaggaatgctgaccattgatgtgggctcactggaaaaagccaacgagttaatggaattgatgcaaacccggaatttaggttatctggcggtgagtttagggttttataaaacattattcagcgcaccggggacttctacttcaagtgaaattccattagaagaacaagccgaaatgggactgacggatggtttgatccgtttctctatcggtctggacaatgacattgaacgtacctacaaaatgatgaaagcctgcatgacagagcttggcatcttgcaaaataaaacaattctttataaataaatttgcacgattttttttttagtttgtttaaatccgctgaaggtttttcttttggcggattttttttgttcctgtttgaaatgaaaagatcattttacctgatacaaaataataaaaccgttctgaaaacattctcagaacggcttatcatctatattttttttatatttcaatggacggattaaaatctatccccaatgcatttcgtttcaatggcggacggattaaaatccatccctacaacgcattttgttgtccaatggggacggattaaaatccatccctactatacatttcgttccgatggaactcttatagcgcttaacttataacgttctccgtgtttagcttgctgttttttcggctgaagccaaaataaatacaaagaccaataagcaaccaaactgtgaaataaatccagttccaaacacttaattcggccatcatatacaaacaacagattaaacctaaaagcggaattaaggatagattctgtttgaaagcccaaaccgttaaaccaaccaataccaataagaagatccacattggaattttatgtttaaacaaactcagtccgctttcaaattttgcagtgtctttaattggcaaaccttttacaacctcaacatattttgcttcatcatcctgatactggcttaataaatgctctaaatcggatgtttctgaagttttattctgaacgtcgatactttttaaataattgaaaactttttcagaatcggttttatccaatgacgtaataatatctgccgggctattcacctgggtctcattggtgataaaactcatcgtggcttttttattgtacccaaaggcaaaaactaatcctatgatcaataaaaccggcattatatattttgaattgatataaggcgttttaaactttcctcttggaatctctggcttattttgcaataccaaaactccggcacaaaccaatacaaatgcaaataaagttccgatactgcataaatccgttaccatggtaagatttaagaataacgcgggtactgcaaccacaaaaccagttacgatagtggcataagaaggcgttttaaattttggatgtactcttgagaaacgctttggcaacaatccgtcacgactcatactcatccagatacgaggctgtcccatttgaaaaaccaacaaaacactggccatcgctactacagcacttactgcaatgattccggacatccattttaaatctaatttctcgaatacaaatgctagcggatcacctacatttaattcgttataacgcaccattccggttaaaaccaaggcaatggcgatatacaaaagcgtacaaataataatcgcccacatcattccacgtggtaaatctctttgtggatttttacattcttcggctgtagttgaaatagcatcaaaaccaatgtaagcgaaaaatactgcagaaactccttttaatacgccacttactccatttggtgcaaacggatcccaattggctgtatctacataaaatataccaaccgcaattaccaaaagcacaatacaaagttttactaccaccataatattactggcattacgggattctttcattccacggtaaatcaatgctgtaatcaggatgataattaataaagccggaagatcggcaacaaaatgaaacgagccaaataaaaccggagaagttgtccaggccgtataagcagactgcagagcaggttctaaattttcaaaggcttttccactatgcatcaaagctgttgcgttattaaatccgtttgaagcggttaagtaatccatctgaacccactgcgggagatgaatccctccactggcgagaagccccgtaaaataatcactccacgatatcgcaacggttatatttccaacggagtattccatgatcaaagcccagccaattacccaggctataatttctccaaatgccacatacgaatacgtataagcacttcctgaaacgggtaccattgaggcaaattctgcataagcaaaagcggcaaaactacaagctaccgctgtaaataaaaacaaaaatataacggctggtccgccgtctgcactggcttttccgatcgtactaaaaattccggcacccactatagcggcaattccgaaggcagttaaatctctggcagttaagtgttttcctaatgcattatgaccgtccgcatcgttttttgcaacttgcttcagaatatcttgtaccgttttctttcggaataaacctgataatgccatatatgattttgcttttaaaattaatttaattcggtctttgtggttttattttgcaaataatgcaaaaattatcctgatttcaaatatataaaacgattttgttttgcatcgctttttgtaatgaattattttcacccacggattattgcggattaaacccagtcacactggtttattcttttcacgcagattttaaaaagatctaagcagatgcgcgcagattttatttattctaatctgtagattctgcgggaaacttttttaccacttcaaatctttgcttattgctttcacgcagattttaaaaagatctaagcagatgcgcgcagattttatttattctaatctgctttaatcccctttgatcagcagaatctgcgggaaatctttttagcatttcaaatctgttcttatttttttttctcgtagatttaacagataaagcagattctatcatcggagaaattttacacagattttcaataaactaaaaataaatctactcaatctgcgggaaacttttttagcatttcaaatctttgcttattttttctcgcagattaaggagatttttttaccacaataagatctgctaaatctgcgagagagaaagaaaaaaagccctacaaattgcacaaattattcttttgccacagattatagggattaaattgattaaaaaaatctgtgaaaatcttttaatctgtggcaaaaataaatgtgcaaaatctgcgtgagaaaaatctaaaatctacattctaaaatctaaaattacttcaggcagtttcttaaaatacttaccggatgctgggcttctctacttgttccatcataaatttggtggcgacaactggttccagctgcggcgattttcacctcctgagcggtggctcttacttttgggaatagggtatcttctcccatttgcatgcttacctgataatgctctttttcgtaaccaaatgatcccgccattccacaacaacctgaattgtaaatggtaaccacattattcattggtaaattcagcatggcaaaagtcgcttcaactgaactcaatgatttctggtgacagtgtccgtgaattttaatttctttcttttctgccgaaaaagaatcagctatgatcttaccatcgacaatttctcttttaaagaattcttctatcgtaaaagcatttttagctactttttcagcggcttctttgttcgttgccagacgcagatattcatctctgaacgttaatattgccgaaggctcaattccgattaaaggtgcttttgctgaaactaaatccttaaaaatagtcacattggtatctgcaattttcttggcttcttccagaaatcctttcgacaaatacgttcttccgctttcttcatgattgacgatcagcacttcataacctaattttgtcaatagttcaaaagcatctataccgatattaacatcataataattcgtaaactcatcattaaacaaatacacttgcccgttggggaaattcttttgttgtggtttatgattttcgtaccatttttggaacgtcttttttgccaataacggaacttgtctttccggagcaattcccatgctttttttcacgagagactgattggaaataaaattcgtaatcgacggaaacagacttcccatcttattcagtttggcgttgtgtgcaaagattttgtttcgggtcgaaaagccgtttgctttttggtattggtataaaaattctgctttcagcgtggctacgtctacattactaggacattcgctggcacaggctttacagctcacacacaattcaaaaacttcgtaaagttctttctggtcgaatttattttctttctctgaataggtcaaatattcgcgtaaggcattcgccctggcacgcgtagtttctttttcatttttcgtcgcgcggtaactcggacacatggctcctcctgccgacggcaattttcggcaatcacctgaaccgttacatttttcggcggcacgcaaaatccccaaactatccgagaaatcctgaaacgttttaatatccggttcaactctgcccgaaacaacacgatggttttcgtccatttttaaggcattcacaatcttaccaatattcaaagccgagttcggatcaaacgccagcttgattctttttagcaattcataattggattccccaatcatataaggaataaattcaccacgcacgattccgtcgccatgttctccactcagagatcctctgtattttttaaccaaaacagccacatcggtggcaatggttctgaaaagttttaaatcggatgtttttttcaaattcaacaccggacgcaaatgcagttctcctgctccggcatgtgcgtaataaattgcctcttgcccgtgacgcttcatcatggccgaaaattcagcaatataagccggcaaatcgctcaattcaacggcagtatcttcgattgaatcggccgctttattgtctcccactatacttcctaaaagacccagacctgctttacgaagttcattggctttgtcaatatcattcccgtaaatttttacccgtgcataaccaaaattgtttttttccaaatcagcaatcaaagcattagcctgtttttcagcatcttctaaagtatgcgacgccacttcaaacaacataatagctttgggctctcccaccaaaaagaaacggtttttaatatgttcccgattcgttttggtacaatctaaaatcgtatcatcaatcatttctgccgtgtacaaatgatgcttcatcgctacaacaacagattctaatgattcctgaatcgtgtgataatgccccacaaccataatactgtgaggtggaggcagatcgtctactttcagcgtcacttcggttgtaaaagccagtgttccttcgctcccgcaaagcagtttgcctaaattgatagtgggttcagttccgccaaacaaatccgatttcagcagaatatcaacagcataacctgtatttcttctgtgaatctcgggtttcggaaattcttttacaatttcttcctgagtggcaacaacagaaagctcgtcgtaaatggttttgtatattttattttctaaggtatcccctttagttttttcgataaattcagcagaagtcagatccttaaaaaccacttccgaaccgtcgcttaaaagagcttttaattcagcaattttatcacgtgtcactccatatcgaatcgaagtggttccagaagagttattccccaccataccgccaatcattgcgcggtttgatgttgatgtaattggggcaaaaaatacgccatgcggttttaaaaacagattcagctcgtcgcgaattacaccaggctgaaccgttacagttttcttttcggcattgtacgagataattttagtaaaatgcttcgacacatcaacgaccaatccgtctcctactgcctgtcctgccaacgaagttccggccgttcttggcgtaatcgacagctgatgctgtcctgcaaattttatcagcttggcaatatctccaattgttttggggatcgctaccgcattgggtttaattcgatacacagaagcatcggtcgaataaagcgttttatgaagatcatcatataaaagggttccttctaatgatgctgataattgttctaactctttaattattgacattataacttggtttataaactaaaacggattcagtgaattacaaaaatagttttttttaaggttctgagaggcagagaggctaaggttctaagtttttttctgtaactgtacctttttgaattggaatttagatttttcgagttagaatttcaccccaatggtcaccctgagcgaagtcgaaggcacatcaattggaacgagggcttcgacttcgctcagcctgaccgtaatgacataagacaaaaaccaagtgccatcctgagcggagtcgaagactaatgaaactttgaggctctaagactctaagaggctaaggttctaagtttttttctgtaactgtacctttttgaattggaacttggaatttttgagttagaatttcacctcaatggtcaccctgagcgcagtagaagacacatcaattggaacgagggcttcgacttcgctcagcctgaccgtaatgacataagacaaaaaccaagtgccatcctgagcggagtcgaagacttatgaaactttgaggttctgagactctaagaggctaaggttctaagttttttactttgattacgcctttttgaattgaaatttggaatttttgagttagaaattcacctcaatggtcacccagaccgttgtggaagacttaaaaccactatttcaatacaaccttttgaaatttggaatttcaaaaattgaaatttacatttgagttacaaatctccaatatatgaaccagccaaacagaatctattttttaggaaatccatatccaaaaggtcacactttagaacaatttaaatggaacggaagaatcgaagaagatgaatcgatttggtttgatttccatttaaaaacagatgcttattgtgccgaagatcaatccgaagacgacgatgaagaatataaaggtgactggcattccaaaggagtctggggcaattttcatcaatgtacaatgtcttcaacacattggggagattatggaattaaaatcaataaaacttcacaaaaaactgttttcaatgattttataaaagaggatttattggcagacacttttccccttgatgatgattttgattatgacgaaattgcattcggaatttatttattaggacacgatacctgtgccaatcatagaataaaaattactcccaaagctcaaaacaaatatgatattgaatggactggaaaaattgctttaacctattccggagccgacgaatttagacatgattttgaacttcttctacataatactgaattcgatggtttctattatcctaaatcctggtcgcacgaaaaagcagcagatttctttaaaactaattttgaagattttgaggaatacgaatttgtcgacctcaacccaaaaagcaaaaaacgagaatacaagttcaaaaaggaataaacttctttcaacccaattgcccccccctaagcggagtcgaatgcttatgaaatctaaactcaaataaaagtaaaattttcattttgcaatcacaattagtaaattaaaattgtaatatcatatcgtgtctgtgcattcctatggtgtagtaatcattcgtcacttttgtggttcgaaacccgtgtttttcaaaaaaaccttttgcatattgtgtagtatcaataattaaagaaaattcagggttgatttgtctgatttgttcaattctatgctgtaaaagcttttcaccaaatcctcttccatgaaagtctttgtgaataagtccccacgccaatgcaaaaaggctatcatcattcatgtctgcaaatcctccacagccaattactttttgattgtactgaacaacaaaaaaccgaacattatctttccctttttcaatacgctctaaaaaattttcaaaatcctgtacctccttacttgcaaaataatccggaacattacttttaaaggcttctatacaatcattatagtcactgcttaaatattctctgattgttgtttccatttttataatactaattagaaccttttatcaccaattaccaacgttttaacagataacaaagtctacaaatctttaatcaaatcacccggatttacttttaaagattgagcaattttaaacaaagtacttatcttcatttcctgagaaccttttatgtatttcctcaaattctctacatccatttcagcatcatgagcaacctccctttgtttcagctgttgctcttctatgatatcttttattctgattcctaattgtttgacaacttccggaacttcactttttcttgtccttttcatgggaatgaatttacaatcaacagattgtttttatatgattgtaaacaatcggttacattcaaccgtttattttatatatttgtattcagctaattaaacacaactcaataacggaagtcgcaaacatgcatattcccctaaaattttagattatgagtacaaccaatctttcacaagaaaccgaaaccaggctaaccaattttttcaacaacactattgacccaaaagaaatggcgaaagccataagacaagtcaattatattgttgccttaggtgttttaagagaacatgaaacgcttaaaaatgagataagcaatctcgaaaacagcttttattggctcaatgaattagcagaagttttgaatccttatttgtgtgaggagtaataactatctttagaattaacaatgaaacctcggttttttaggagcgaggtttcattgtttaaaaaaattttctctttaaatataattttatgttcattttaagcaaactcaaattcaagttgatcttgtttactctttcttaaaaagtctttattcgacatataactccaaatactataatccaaagattttcgagaaatatttaaaaaatcggcagcaaactctaccgttttctttatatcaatataacctttaatttcaatttcagccatttctacaaaactataaatatgtctatcaacagccacaacatcaaaatttaataatttcaaaagataatctactgtttttggcccaactccttccaaattcaacattttttgttgattttcatttttttgcaagtgattttttaaatcatagcacgtatctatattattttcaatcaaaaaatgaatacaatcatatattctgtttaatttagtttcatgcttccaattaataatattttagctcgaaagagttgttaggatattttttaatctattttttcacgattaaacgattaaccaaattaacggttcaactttcataaaaccattaggttacagtcacgaatatcagaattatcaaagcgtcccaatagctcgaaagagttgttaggatattttttaatctattttttcacgattaaacgattaaccaaattaacggttcaacatttacaaaaccattaggttacagccacgaatatcagaattatcaaaacgtcccaatacctcgaaagagttgttgggattttttttacctaaatcctgagtggcgataaaggaacaggaattaatgttggccaaatcaatcacattgattccgccagtttttccgtcttttagatatgttaaggcatcttcgggatcgcgaaccaaaatgtgcatccacgaagggcattcaaatacaccttcacccagagaataagcttgtcccagaagttcggtcatgccgtattctgagtgaatagccgaaacgccaaatcctgcacaaagttgttcgtgtaattcctcgcgaatcatttcttttcgcttgcctttcatgccgccagtctccataataatagtattctgaagattgaactggtgtttctcaatcaaatcgagtaaggcgtaagtaacaccaattaagattacattttgaccggattcgtctaaagcagttagtttttttataagatcgtcgtgattgtgcaggtaaaacccactgtcaggctgattggagcgctttattaaatcttcgaccatatagattaacgaagatccatcacgctcgagataagacggtaaaagtgctaaaacaacgtaatcttcgatattgccgtagaattgtgaaaatccattgcggtaactttcttcgtaaagacttacatcggtaacgatatgtctgctggtaattgcgcctgtggttccgctgctggtaaaagttacctgagccggatcattgttggaaactacattatgacttttgaaaaactgaatgggtaaaaaaggaatttgttccaatgattttacctgttgtggatttacttttaaaaaatcgcaaaaatcacgatagacaacgttattctcatgttgaaaacgaaacacttttagtgctattttctcaaattgtttctgacttgaaatggtaaagatatcgttggctgtgatcaaaactttttttgtgcaaagatattgtttttagtttttagtcacagtattcagtcgcagttttcagttgtcattttagggtttcgcagaaactgaaaactgtgactgtgactgaaaactaaaaaagctctaattttcattagagcttttgtgttttatcgaataatgagctttcgtgttgccgaagcattttcttcgcttattttgatgatgtaaacgcctggaaccagatcagaaacgtttaattctcgagaacttaaatgtgtttgaagtacctttttacccagaacatcaaagatgataatctctttttctaaatcatttttagaagagatggttacttttccaccggtcacggggttagggtacaagcttaatccctcaatggttgctacctgttgaggttttggtaattgcttactgtcttgtgccgaaacacttacagtaaagaaaaaagccaataagaaagtaatataaaagtaattttttgccatcgcgttattttggttactgtaaatatacaaaaaaaagtacaaaaattacaccaaaaaaaaaacatcctaaaattttaggatgtttttaacaatattttttttaaacttttatttagtcaaatcaacaccattaactgttgcccaagcacctccagttattgaagctccggtagcagtatcatctgttacaaaatttccagctgggaatgcaacagtaccgtcccaaggagctactactacacctaagatgtttttagaagtattagtgattttaactttagtaattttaattttaccaccgtttacttggtttgtgtttgttgaagcatcttgtatttttacagctgcaccagtgtaaactttaccagcttcagtatagtcaccgtaaccatcgatgataatgttactgaaatcaccatttccttcatttttgaattggaaagcatctacttgaacatctccaactgcttcaggagttgtaccagcaattcttcttaaagtgatatttgtaactttagggaagtaagcgttattgtttttagaagattcgatttcaattccgaagtttccttttacattttgacgtgcataccaatttgaattggcttgaccttgccatccatcttgccagtcaaaagaatcatctgtattttcgtaagagatcgcatttgttaaacttgcagttcctccgtaaaattcgaatccgtcatcagcacctctgtaagatactaagtggtctaaagttgttcctgatcctacagagtagaaagagaatccgtttaattctttagttccgtcagctaatttagaaccagcatattctactcttacatattttaatgaaccaccgttatgagcagcatttgttcctccatatggtaaagcatttccatcttctgaagtagaagtttttacaccgttgatagcattgattggtgcgtcaccatacatgatgatacctccccaagaacctgctattttagatttttcagtaaatacaactggtttgtcagctgtaccattgataattagtttacctccatttaagactactaatgcattatctccggtagttttatcaactgtaatagttgaaccagcttcaaaagttaatgttacacctgaattaactttcaccatacctttcatggtatagtttcctaaagcataagttttatcagctgtaattggacctgtaatttctccagttgctacaggtacagccgttacagttacagtttttgtaacagaaacagattgtactgtataagtaattactgaagtaccaacagaaactcctgtgataaccccagttgaagccgcaacagttgcaacagcaggtgtagcacttgtgtaagtaccgccagtagttgtactgctaaaagtggtagtcgctcctacaacaatactttcagttcctgttaaaggagctatagtaaatggagccggatcgttgtcgctactacatgatgaaaataataagccaatagaaagggctaaagcgaaaaatttagttttcatagttgtgttttaatagtttatttctttgctgacaaaattaggatgggaatacttcatatgtgttagctaagtattacaatactgttattataaaatctcttaaatatgaatttaatgttaagttgatttataatggactataaaaaaagccctatcgaaatagggctttgtatttataaaagcaaatagtattagaatgtggatcccaggcttaaagaaaacccacggctttttttgtaacttcttgtgatcggatctcctacaacaggagttacgctgttatctccaatttcaaatttacgagcagggtcaattaagttgtctgctgagaattttatatcaaaatgatcatttattttactgctccatacaaagtctaattgttgtactggcagttcgtaaatatgatctaaaccatttgtccctactgcatagattctctttccaaatacggaataaactaatgaaagagtattgctccaattcttattaatgtcaaattgatattttaaatcggaattaatcaaccattttgaagcaccttgtaaatctcttgatctatgagtttctattgattgtgaagtacttccgtcagggtttatgatgaaaggttttacttctgcttttgtactcattaatgaagtattgaatcctagtgagaaatctttaaaagtattagtaagtcttcctaaatcatatatgaattcaatttctgcaccgtatagaacggcattgtctgaattcaaataggtaatgattgtagaacctgcagcattagcggttaatgttctttcaattggatttttcattttctttccaaaaagaccaactgcaaacatttctttcgctgttgggaaaagctcatactttaaatcaacattgtaattgtcgctatttactaaatatgggtttcctttcatagaagttccatcggcattgatgtattcaattggataagcttccattattacaggttttgtataagttataccaccggctaaacggatatttgatttttcattaatactgtatttagtatttaccgaaggtagaaaataaactttatcgtaatttaaagttatgaatggttcgtcaaatgaaccttgttgtctgtacttagtagttctatttgcattttctactcttactccaccattcacttcaagtttttcattgaacttataaagtaaatttgcatacccggcattggttccttcttttaggattgctttataagtcgagttagagctttctctgtagttaaaagcacctccggctacgtagccgttcaattgattgtcaatgctattcaaaggagcatcaacatttggacctgtagttggtgaaataaaacgataagaagattccatatcagatttatttccgttatatccaactgtaagtttatggtttttgtctgatccaaactttaagttgtattctgctaagccagagaagtatgaatttccggtaatttccagatattgtttgataaagttatttccggcaattgaagctataactccgtcattttcagtttttacacctgagaatgcttttctgtcaggttggtcgtattttgtttttgcataagagataccagcttttacagtctgacttttgtcttcagttaatgcgtattctcctaacagttgattattccaataatttgactggtctaattgattcgttcggataagagttttgtttgttccggttcctgtttcagcatttgcaacaccaaattgatctttgattaaattgtcagtagttcttataaaaagactattgtaagctaatttgaatcttttggcactataatttaaacctaataaacccgttaaagaagttttataatggttgtctgtcgtaacaaagtcagttttgtaagcgattccggtactttgataggcaaaagttctgtctactccttcttgaatcccatagctgttttcagcatttatcgaaaagatataagaaaagtttctgtccttacctaagtcgaatttttctgaatgtaaaaatccaatacttgtgtttagtggacttcttatcggtgaaacatcaaaaccactttgaaatgaatttaacgattcttgaggagtaaaaacatgtccggaaggagtacctcctaataatgaaggcagttttctattgtcgcctgtcattccaaagaaaccttctgctgagtctgcatctttagaaagagagaatcttttaaaattactattggcaatataactagttccgatattaatttttgtaatgctttttgtgtttttcgaagtctggatattaaatgttcctccagcgaagtcaccatatatattagggttgaaagtcttgtatacttctataacaccaacaatatcagttgaaaataagtccaatgggataatctttaaaaaaggattgtttgttggagcggcaagatcgttgattaataaattgttgtatcggtcttctaatccacgaacaaataaacctcttgatcctacttttgtaatcccggtgatttttgtcaaaccttcttcaacatcactaacaccttttcttgacatttcctgtgctccaatactttgtttgataacaacagcatttttttgatcgagtaataaggcggtttctttttctttgtttacggcagacgattttacaacaacatctttaagtgtaaaacttcctgacgaaagtacctgatttacagtgattgtttcatttgcttttacagtaactggcttttctacagattcatatccaacgaaactaaaaataatgatataatttcccggatttacatttaaggaatattttccctcaatgtcagtgtttgcgctaatgtttgttccctttaataaaacatttgcaaaaggtagggcttcattgttggtttctttgtcggttaatacaccagaaatcgtacctttgttttgtgcgatcgaaatcgtacagatgaataatgtgataaatagaaattttaaattgaatttcatttcagtgttgtgtttaaatttttgtgcaaagaaaaagacgctgtgtaaagttcatgttagccacttgttatgttttcgtgttgcttagattatcaaattgttaccagattaaattaccgttaaccgcaatttttaacggtcgttttattagtatatttaccatctcaaatgaaaatcatcgaatgtataataaagaaaatttgatgtaaaaatctcaatttttgctatttatgaaaaaaacacaaaccaagattttactagttgacgatgaaccagatatcttagaaatcgttggctataaccttgctcaggaaggctaccagattgtaactgcctctaacggaaaagaagcaattgcaaaggctcagaaagaattgccggaattgattattatggatgtaatgatggcagaaatggatggaatggaagcttgcgaacacattagaaaaattcccgaattaaataatgttatcataacattccttaccgcaagaagtgaagattattcacaagtagctggttttgatgcaggtgcagatgattatattaccaagccaataaaaccgaaattattggtctccaaagtaaaggcgctgttaagaaggttaaaagaacaagaagtcgtaagtgataccttaaatgtaggcggaatagagattaaccgtgaagaatacaagatcattaaaggtaacattgagattgccttaccaagaaaagaatttgaattgttttacttgttagcttcaaaaccagggaaagtttttaaaagagacgaaattcttgataaagtctgggggaatgaagtggtagtaggaggaagaacgattgatgttcatattcgaaaacttcgcgaaaaaattggagaagacctttttaaaaccataaaaggagtggggtataaatttgaagtttagatttttaaggtcctgaggttcttgtgagttaagttactaagaaaactttatcaggatttaaattcattcaaattgttttaaaatattcaatacatttaaaccatataagaattgaagtttgtgtaatcttcattttcttatatggtttttgagttattcctttttttcttttgcccgaaagaatagaactcaaaaacagaacttaattttcttaatctcttaatgactcaataatttcaatgaaaattaattttaaaaaaacatacaaatttgctgtaaagtcagcattatacataagtctttttgcaacaggatttgtgatgatattgatgtctttgttttataaaaaccaattgaagtatcaatttgcattcggaataatctttataatatccatttatgctttttcatttttggtcttgcaataccgtgtggagcgttttatttatagaagagtcaagaagatatacgatgaggtttcgttattagagacaacaacattgatcaatcagcctataactacagacatggaaacgctttcacgcgaggtaaaaaagtttgccaccgataaaaagctggaaattgaaatgctggagatccgggagcagtaccgacgtgagtttcttggaaatgtttcgcacgagctgaaaacgcctttgtttacggttcaggggtatgtttcgactttgctggatggcgctatggaagataagaacattcgaaaaaaatatttaaagcgagctgagaaaggggttgagcgattgatttatatcgttgaagatctggacatgatcaccaaattagaatcaggagatctggatttaatcatgagcgattttgatattgtagaactgattcaaaacgttttcgatttattggagatgaaagccgacaaaaagaaaattaaactggcttttgaaagtaaaaacattaaatcagtaatcattcgcggagataaggacagaattcagcaagttctggaaaacctgatcgtgaactctattaaatacggtaaagaaggtggtttgactgaggtgggtgtggttaacttaaccaagaaaaaggtgctgatccgtattagtgataatggggaaggtgttgaaaaacaaaacattccgagacttttcgagcgcttttacagagtggataaaagtggaacacgttcagagggtggttccggattaggattggctattgtaaagcacattattgaagcacataaagagaaagtatatgtagaaagtgagttcggaattggttctgaattctcttttacgcttgaaaaagcaaataaaacagtaaaagctgaagttaaataattgtaagcttgttggagtgaagtgtcgtgaaatctagtgttttaacactgatgaaatttacgtaactatttcgcaacaattcctttttgttatagtaacaccttgttaatgatatcttaacataggtggcagatctttgcattcgaaaaattaagggatcagaaaacaaaaagaatgaaaataagactaatagcaattctgttgctaattacctgtgtatcaaatgcacaggatctaagtaaagaagaggtaaaaaaagaagtagtacgtcttcttgattcaatcaacaaagcaaaactgccagacactcaatccgaaaagaatgatgatgaaacggataaagatcgttggtatgataagatttctttaagaggttatgcacaaatacgatacaatggtttgttttctacaaatgataaagtatcatgtgatcagtgcgacagatcatgggggacaacttctacggccccgaatgcaaaagcaaacaatggtttatttatcagacgtgcacgtttagtattttccggtcaggttcatccaaatgtatttttctattttcaacctgattttgcgagttctccggttacaggagttcagaattttgttcaggttcgggatttatattttgacctttcttttgataagaagagagagtacagattacgtgtcgggcagagtaaaataccatatggtttcgagaatatgcagtcaagtggacagcgtttaactttagatcgaaacgatgcattgaacagtgccatattaaacgaacgtgatttaggaatgtttttttactgggcaccggctaaaatcagagagcgttttgaaatgttggtaaaagacggttataaaggatcaggtgattatggtgtattcgcttttggagtgtacaatgggcagatcgcgaatagattagatggaaacagagatttgaatgtggtggcaagagtaacgtacccatttgtaattggaagccagattatcgaacccggaattcaggcttatgccggaaaatgggctttttcaggtgaaatttcatcaggagttaaagtgaacaattcacagcacgtaaaagatcaaagggtaggagcaacctttgtattatatccaagaccttttggaattcagacagagtacaatatcggaaaaggaccaagatacaattcagtaattaatgcagtcgatgaaacagatctggacggtggttatgttttactgaactacaaattagatattaaaaaacaggttatttatcctttcgccaaatttcaatattacgatggaggaaagaaatatgagaaagatgccagaagttatgttgttagagattatgaatttggtatagaatggcagcctctaaaagcttttgaacttactgcggaatatgtgattgccgacagaactttccaggacagtgcacttcctgtgaacagacagcaaggaaacttattgcgtttgcaggcacagtttaacttttagttttcatcctcaaaaacggtaaacagagtatcccagtctatcgtatcgttaaattgagtcagacctttaaacgactttacttttgaaagatcttcaatcgtaaagtcgtcttgcattgcataaggtactaaattttcgttctgaagctttatggccagatattcctgctcgtattgccccggagttggaataaaaaaggctttcttgcctaattttgccaaatccataacggtcgtgtaaccggagcggcataagacaaattcactttcgttaaaagtctgttccaactgtttagagttcatgaaattataatacgtaacatttccggcttgccatttggtttgtgttttttccacaataccctgaacaaacactacttttcctttataattgacaatttctttctgtaatttttcgtccaaaaaagtacgctgaggttcaggtcctgagaggataatcatcagatcatatactttcggagtgtcttttttacgcattctgcttaatggaccaatatactttagttttagatcatccgttttaagatgacccaattctccggtaagatttatcgtgtcattagtgtccggaacccagcattccgtgtatttttttataatatgctgatggcatttactggtgaaccaggtggtgtttccggtcatgacattcaattgatgggtcataaaaacggaagggacttttttactgaaaacccctagtcggttatccgaaataataccgtctattccgtgttttttaatccagctttttacgatttttttttcgtcaaggatggcgacaatcatttttggcaggtttttaatcagcttccatttgaagtttttagcattcttggcgtattcgatatgataagatggtaattcaagggtttgaatgtatggaaactcttttcgtaacaatgctaacgcaacaccgtcagaagcaattatcgggatgtaattgttttcctgaagcgcttttataatagggatgcatcttgtcgcatgacctaatccccagtttaatggagcaactaaaattgttttgttcgcagaatagtcaatgctcatagtgtaacactttttaaaaacgaagataaagaaatatgctttttatgttatttcgtacgtattactaaattattaactctataaggggcttcagcccatataattcgttgtttaggttgtggaattagtagtgtttggaaggaaaagttacttgtatgttaacgaatatttggtttctcaatagacaaaaaaaaggagttactgtaagtaacccctttcagatattggtaaaaggaactttaatcctgaatataggttttgtttccatttttattaatgtagtatttaccgccttttggtccggtatatactttttttccattgtactcgccggttactttgtcggctacttttggagctttttcattcgtttcttttattgttttcgaagctgttttttttgcagcagcggcgtctttttgtgctgcttttgaagcttcagttgcttttgctgctgtttttgttacgtcagcttttgcactggcggcttttgtgcttgctgctttgtcagcggtctttgtggcttttacagcatcagtttttgcttttgtagcctcgtttttagctttggttgcctgtttgtcggcagctttttttgctgtgcttgcagactcttttgtcgcttttgctgccgctttgctggcatcatcagctgcctttttggattttgaagtttcttttttagcgtcggctttcgctttatctgcttctgcttttttctttttcgcagcagcttcggttttgctttttactgcttttgtagttacatcttgcccatagaaattagaagacagaagaactacaaaacaaagtactaataattttttcataatgttacaagtttaaatttcatttaaaattaaacaatttctgattatgttttttgtaaagtgttaaaaataagcacggagttgtatatttccggtatgaaccaccgagcctgtctcactttttcgcccctgataatttaaattcacatctaaaaactgtgtgatgtttttttgtaaaagaaacttccacaccaggttttgtccggcctgtagcccttccagcatttgaaaccctactgacgaaaattcatttcctgtgaatttgttctggtaaaaagaaaattctccgtttaccgttatttttttttctcccgcaaatgaaaatgaagttcccaatcgattttgaaccagagtttcaaaatttcctatttgattttctttgttctgaaactcaaaaaagaaatccagactggtgtttttcgaaaacaaataactcactttgggagccatttggtggcccgtgatagcatagtttttttcgacaaaatcttcagaaaccaggtcggttttaatcgttttggtaaagaagttaaacagccagcttttttgatacaaatgggtgtattgcaattgatgtgaattgttttgaacattttgcgatccaatcgaaagtaggtttttgcctttattgaccaaataagtataggtaacggaatgtttttgtttgccgcgattgtagtacaaactatttctgaaactcgaattaagccccagtatattttcttctgaagaattaaacggattcaattccagacgctctccctgactttttactttgcgatccataataaaggatgtctgattgtaaaaataagacaggagttttttgaaaccggtctcgttctgccactgcaatggatttaatgccacagattgggagaacctattttgattggttttgatgtaaacccgatttggtaaaaagattcggatgtagcgggcctgatcgggaaaggctgcaatttcaaattcttccagttcctgaattccgtttccgttgtaatcgttccaggtataaaccccctgacccgtcggaacttcaatataggtaaactcctgttgggcaatagttcctgaactggtttcataggtggttccaatttgcaggagctgattaaaaaaacgatcgttataaagtattcgggagtttaacgaaggttcattttttcgggtagcatctgtaaaatccagtttgcgatagctggcatataccgccagatcggttttcttattctgaattaattttgattttaaaaagtaagtttgagaattgtttacatgctgtagagatccgttttgtaaactgtcatttcgacgttgcaaataaccaatttcgacaaaaactttagtgctgtcaccacggccaataaaaacaccatactctgaaaatcgttggcttaaggccgagaactgattagtgattttattcttctgctgattgtcttcgagctgcatactggcgccgacccagtttttaccaaaatgatatttagttctggtttgattccgaataaattttgaagtagaatttgtagcatctgaattcaggaagctgcccctattttcgatcgtccattgttgcaatttgaaaagtgctgttgaggtgtgacgcgatcctgaataacttttggagtaatctaatttctcaaattgataggtaaacaatccaatattggaagtctctttttgggcaaataaatcaaaatttagtcctgtgatcaacatgttttggttcccgaatagtgtctcgtttaaattccagtcgcggttgaattcaatattgtacaaacgctcaacagacctgaaatcttcctgaacgaattgatagtttgcaaaggcatccaaagaccagcttcgtgtaaaaagacgttttttaatattggttttaatagcaataccgtcattattggcatcatctattctagagaacaggtttttgtcgttgttgcttactgcaatttcaaagtcaaccagcgttttttcgtccggattgtatttgcctaaaaaagtagctacctgtaattttataggtgcgaccagattgacaagtggttcataattgccttgtaaaattccgttaataggagctttatattcataaatgcgttctacagagttattgttttgaatgatgtaattaccggcattgtttccaacaagactaaattttacgttgtataaaacagtgctcgcatcttttgaatattcataaatttcgatagaattgactattttttttttgtaaagtattttagtatcggcataggtgtcttcataggccgaaggggctttcattaaattcggatcatctccggcctgacttagaatctgaacctgttcttttgaaagattttgttgtaaaggctgattcttcatgtcgttttcagaatagagataaccgccaaaactccagtttttgctttcatgagttccgcctgcataggtcacgagtctgttgtaatttcgttcagaatattggtactctacattaattcgcatttcggaagtaatcgtaaaaagagaagtgaaagtaatttcacccgcattgtagtcgatcacataatcgttattttctccgcgtttcagcaaaacaccatttacataaacacgctcagagcctgaaattaccagaacatacaattcaccattttgtccttttaatttataaggtccctgatttccttcctggcctgtaaaagtacttttggcgtattgtccctttacaaaagcgactgaagcaaaaatgttggttttgttttcgtctgtaccaaaattaaaattggccgaaagcccctggacttttttattgaaatttaaaaactgggtttttctgttctctaaaaaaacatctccggcccgaatattccagtcgtctgtgaaaagttccataaagatattgtcaaactgatccagtttttgagaataaccgccatcctgaagcgggatattgctgtcttgtaaggaagctcgtaaactaattttgtcagatatttttcctgtaatctgcaaatccagattggaatttagaactgtattttggttgtttccgacagttactcctcttgtaatgcttccggatgtatttaaaccatcaaacggagtgacttttttggtgacagcattatcaattttatacagcttttcagtaccaatgtcgttggatacgacctgatttgatttgtataaggtatattcccgggttagaaaatcgggatatttcagataatttacaattaaagtatcggcagttgaacctaacttttcatttagaactaaagttccctttttaaaatcaattttataaaaagtagaatcgacagcttcatttttagttgtaaaaagttgaaaaaatgccgaattgatacttacttcttcaagatgaatagtatcccggctggcaattattttcctggttttgtacgatgataccgtttcctgtgcctgaagcccggaaaaccagatgaaaatagtaagaaccagtaattttttcaacataaatactttaactctcaaaaatcaaaagtagtatttataattgggaaataaagagtccgcgattcagacagattggggatccgtttaagcgcaaattgtcctatctcccgcttctgatctgacagcacatcgtcataaaaatagaaagtgctaaaacaagagcggttcccgttttaatcatgctgccggcacgttctgaattgtaaaagaaataggccagataaagacagcttataacggcaatgctgtatttgagtataaaaagtttcatgtttttaagggtgatttaaaataataatcagctgttttgagttcaggtactaagagtttcttgtaaaaattagtagtacagcgattattgctatggcggtgcatattgaattggggtttgcaaaatttatagtccacccaagttgcttaattttttttggagggaacaatcttttatcctgagggttataatagaaaactccccaaatccaattgtttggatcgcggttccagttgttttgggtttcttttgtaggtttagtgttgaaatccattattttagagggttaagtttttatcagaggaggggattttgataaaatgatttaactgttttttctactaaagcgatatcctaatgctataataatgatcaaaaggcagagaaataagactggtcgggtcatggttttttgggtttagtgttttttggggttaatccaattcctgagcctggttaagcacaagaaattatttatttgtttttcggtggcgctaatttagcattttgtaaggttctctattatgtgattatcgggtatttttaataagaaattaacatatgtttttttattttaaaaataatttgttttttgtgagtatatatgtgtaaaagtgtcctctattcttttggacggaaaaatttgctaaaccatgaatgtaattgtaggaaacaagcttaaaatacttcggaaaaataagagaatgtcacaggaagaagtggcagattttcttcacatctcacaatcagcatatgccagaatggaaagtggtgaaagcagttcatgggcgaatcatattttaagaatctgcgaaatttttgagataattcccgaggatttattgaaagtggaacataaaaaacaggatctgaatggggagggtttctccactaccactgctcatttatcgggtaaaataattgaggaatatgaagaacgtataaaagagttaaaacaaaccattcgcgatctgaagaaggtgtagtttttattttaagaaagagaataaaagtagttaaaatagtatttttttttagctttgtatggaatgtaacaatcttaaacaatggattccagtaaagaacttttattcttttttagtgcattaggagcttttaacggaattatcttaagcatctatttcttcttttttactaaaaaaagatttcttacaaactattttttgggaggccttttgtttgctttaagtatacgaatcgcaaaatcagtatttgtttattttaatccaactttacccaaaatgtatttgcagattgggctgacagcttgctttttcataggtccttgtttgtacttttttttaaaatcggctgtagatgaaataaatgtaatgccaaaatcatggaaactcatacttctattttgggcgatcctcagtattttggttggtgttatttttccttatgaatattatccgaaactctggagttttcgttttatcagaattatttatctgcaatggtttatttatattgttgcttcagggtttactattaaagcaattctgaaaaaaatcttgagcagaaaagagaaaacttctccatctgaaacgtggtttgggatgctctttttagggatctttttacttttcgttttttattttcttgctttaattggagcaccggctgcaatttatattagcggtgcagttgttttttcttttattctatacttagtggtatcaatccttttgtatcgaaagagaacggatgatctatttctgttaaatgtcacaaaaggtgctgtaaaaaaaatagatactgaagaggcagaagctttatctcaaaagttagaaactataatgaatgaaaaaacattgtataaaaatccaaatctttcactgcaggatctggctaaagaggtcaatattacaagccatcaattatcacagtttttaaacaataatttaggtaaaaactttaccagttttgtaaatgaattcagaattagagaggcccgcgaaattataatttcaaatgacaagcttactttagaagctattggttacgatgtgggttttaattctaaatcgacattttttgcaacgtttaaaaagtataccggaaaaacgccttcttattaccaaagcgcagattttagaagctcaaaccaagtgtgaatttataaaatggtactcctgatttctattttgaagatctcatgacgtgatttactgctgacttttgttccaataaaagtcaaattttaattacaacaaactatgagatcccttgttaccctttcttcctgttttttatttttctgttctataacctcaaaagcacaatctaaaccaacaaatcaggataaggttttaaatcagagtgatgagttaaaggaagtggttataaaaagtcagccgtcattgttaaaacatggagcaaacggaactgttgaggttttggttgcaaatacattactttccaccagtagctctgttactgaattattaggcagagttccaaatgttattgcagctgatggacaaattagcgtgcttggaaaaggtgaagcaattatttatctcaatggaattttgattaactacgaacgatttgctgcaattccggtttcgcaaattctgaagattgaagttgtttccaatccttcctcaaaatacgatgccgaaggaaaagcagtgatcaatattattaccaagaagaatattgaaaacggaataatgggaacagcaagtcagcagattaccgtttctgaatttgccggaaccagtaccaatacactgcttgattttaattatacaaaaggcaagttctcttttataaccaattacggattgcaattaggaaaaggaagggaattattatataccacaagaacaagatccaataccgacgagtatctgcaatcaaaattgactacagattggcaaagacaatttaataattactcgaattttggatttggattgcaatataccatctcggacaaacagtacattacgttggggtatagcggaaatgtcgcagatttaggaggagcggttaaaagtcgaaatgccataacaaataacagtagcaatagcctttacagtaccaacatttctaaaaatgatgtgttgttaaatcagttcattaatttaaattataatgtggtaacagatgatcagggttcatcattatttgtgggtacccaatattctaattataatgggaatgttgatgatttcattgatgaaaatggtctggtcgatagctttctgactgaaaaatatttaaagaacattgtagaaaacactacaaatattacaagcctacagtcagattttactaaaaagatagatgaagatacaacattagaaatgggggctaaatttagccgcgctgcgatcaattctaaaacgaattttttggtatcgaaagtaaaagaaagtgattttgaagtggacacggggctttcaagtgattttaaatacgatgaaaaaattggtgcagcttattttagttacctgtcatcattaagtgaaaagtttagttattcgcttggtgcccgaggcgagtggaccaattacgatttgcgtaccaatgctaacggaaatcaggaatttaaaaaaagttatgcgaatttttttccaaacgttctgttgaatgtgaatgttttggatgaattaaaggtgcatgcgtcttatgtttccagaataacaagaccacgatatcagtctttaaatccatttgtcatttaccaggatccttttacgaccatagaaggaaatcctaatttgttgccggaaaaaattcatgcttttgaaattggtgcattctacagaaaattcgattttaaaataggatatacacatagaatagatcctatatccggagctgctttgcgaggagagaagccgaacagttatatcttaagatcgataaattttgatagagaaaatactttttttacctctctttcaagatcgttcaaaaataaaatttggagttctgtaaatacggtaagtgtcagttatagcaaagcggttgatcataaatattcatatgaatttggtgctgtaaaaccacagttgtatttgtattcgaacaatacgtttacaatccccaatctgttcaaaatacagctgcttgcctggtatttgggagacagaagttacggattgggtcatgatgatgatcggtcgacagtaactattggaattgaaagaaacttttttgatgatgctttaaaactaaattttacagccaatgacatctttcacaaatttagaacttccggaaattataatgtaggacaaaccgaaatctattatcacagaacctatacaacaaactatttcagactggttgcgacctatacttttggaaattcaaaaaaacaagcatttaagaaattaaaaacagaagaagtggagaataacagggcaagatgattgaaagaaaaatggctcccttaatcaagaataataattttcatgactttgtattttgatataatcgtttttttgtgcaagtcagcagagctgtagtataggtaattggcttatctctatagaaaacagtcggaggagttatatgtttagttttttcgctaagttctttccatcttaccagatagtattgtttcttaacagttgttgaaataataataagaattataaataagagtatgtttctatcgattttataagcgtatttaatcttttccttgtttaggataatgaggtataatgagaccattattattgtaatctggctttcgatggctctgaaaggatttgtgagtaagcataatgcaaaagtgattaaaagaaagtagtattttggattgaaggttttggtgtttgatgattgataaggttcgaatatttttttaactgtaaaaagtaacaaaaatagaattggtactccaagttctattgcagtttgcataccaattgtcataaaatacgattaattttattttgtcctggatttgatttcttcattgatgctatctgcctcaattatctgtttttttattccctttgtaagtttatacgttatactgaacctaatccatttcgtgtcaaatttttgaaaaataaaagagtattgatccagaattattgaagtacttttaagtttatatgttcctaaaatatcatttgctgtaatagaggccttaagtcttttacttaaaaaggttttacttatacttgaatttaaagaaaacagataatttgttttgtaggggccttgaataaaaggagaaatgtattcgtttactatttctagattaaagttgttaggaaaagtaaataaattagtagtggtaaattggtttgaccagttgtaagaattaatgcttaaaaaatcgtctgaagatttaatggtatcatagaacataacaatgttaaaatttagattccaccatttaaataaatcaaatgtcgagttattgctaaaagataaagaattgccgtttttaatattgagtggtgttaaaattgtagataagatctcattgttttgaagaggcgtttggaaaatttcatttttattaatggaatagtcaattgcaaaaacataattctgctttagtatgtattgtagctcaaactggtgtgaaatggagggttttaaattaggatttccaactagtattgtatttggatccacataataattaaatggcattagattattaaaagtaggtctggttattcttttgctataggacacattaaaattattagtctgcgaatgattatatgagatactaaaaaaaggaaagaaattagttttattatgacttaacgtatagctgtttttactattgattccttcggaaaaattagactctactctagaacctaggataaaatcaatctttttaattgttttcttatattgagcatatcctcccaagatccattctttatatctataatcattagactttctgtatcttatacacatctgacgctgccgacgactagtcgagtgtacatctcggtggtcgccctatcattaaaaaaaatgtggggtcagattcttagattcttagattcttagattcttagattcttagattcttagattcttagattcttagattcttagattgaaatttaggggtttgggaaataactttactaaaaaattaaaaattttacctttatttttttaacaatcaatccattctgttcgaagtcagactgagcggagtcgatgtcaaactgagcgaagccaatgtcaaactgagcgaagtcgatgtcagactgagcgaagtcgaagtcaaactgagcgaagtcgaagtcagactgagcgaagccaatgtcaaactgagcgaagtcgaagtcaaactgagcgaagccaatgtcaaactgagcggagtcgaagtcagactgagcggagtcgaagtcaaactgagcgaagccaatgtcaaactgagcggagtcgaagtcagactgagcgaagccaatgtcaaactgagcgaagccgatgtcagactgagcgaagccaatgtcagactgagcgaagtcgaagtcctttttaccctaaaaaactcctgctccactcgatttgatagcccaaaatctaacctccaaaatctaaaatctaaaatctaaaatcaaccttccattcccttgcgtatattcaaacttattcttatttttagtacttgaactatgccgttatgatagaaatagatattgaaaaagaaaataaagcaattgcacaagagtataaagagttacttcgaatcagttatcagactttaagtcccgccgacaaaaaacttatccgtaaagcatttgatgttgcagttgatgcgcataaagaacaaagacgtaaatccggagaagcgtatatctttcatcctattgcagttgcgaaaattgttgcctccgaaattggtttgggagcgacctctatcgctgcggcccttttgcatgatgttgttgaagatactcctttgacagtagaagatattgaacgcttgttcaatccgaaagttgcacaattggtagaaggtttaaccaaaatatcattggttcagagagatttgaatgcctccatgcaggctgaaaatttccgaaaaatgatcctgacactgaacgatgacgtacgtgttattctgatcaaactggccgatcgtttgcacaatatgcaaactatggattcgatggcggaatacaaacaaactaaaatcgcctcagaaacactttatatttatgcccctcttgcccaccgtttgggattgtacaatatcaaaaccaaactggaagatttaggtctgaaatatacagaaccaaatgtttacaacgacattgtaagcaaaatcagagagacaaaagaagaacaagatgcttatatcaaagacatttcagatgttttaaagaaatctttagacagtgaaggtgtcgattatgtcattaagggacgtccaaaatctatttactccattcgtcgaaaaatgcgtgctcaaaatgtaagttttgacgaagtgtacgataaattcgccttaagaattgtgtacaaatcagatcagcatgatgaaaaattcgtagcctggaaaatctattccatcgttacagatcattacagaccgagcccgagtcgtttacgtgactggatttcctctccaaaatcaaccggttacgaagcccttcacattacggttatgggaccaaaaggccgttgggttgaagttcaggttcgaagcgaacgtatggatgaaattgccgaaaaaggatatgccgcacattacaaatacaaaaatggcgcaaccgaagaaagcggtctggacgtatggctgaatttacttcgtgaagcactcgagaatcaggaaaccaatgccgtagattttgtcgaagatttcaaaatgaatttatattctaaagaaatctttgtctttacaccaaaaggagaaatcaaatcacttccaaaaggagctacatcgcttgattttgcttttagcattcactccgaaattggaattaaaacccgaggaacacgtgtcaatgggcgattagtacctttgaatcacgagttaaaaagtggcgatcaggttgaagttataacctctgccaatcaaaaaccaactgtaaactggttggaatacgtaacaacttcgcgcgcgaaaaccaaaattaaaaatgttctgaacgagaacaccaaaaaaatcgccgaagaaggaaaagaactccttacccgaaaattaaaacaccttaaaatcactattaacgaacaagttatcaatgaattggttaactttttcaaacttaaaaccagtttagatttattttacagagtggggattggtgcgatcgaaaatcaacaattaaaagattatgcggcgcaaaaaagcaatacgtttatcaatttcttcaaaaataaaattaagcgaaacaaggacaacaccgcttcagaagacattcacaaaccaatcatcagcagtaactacgacatgctggtttttggaacagagcatgacaaactcgattataaactctccccatgctgtaacccgattccgggagatgatgtttttggatttgtgaccatcaatgaaggaatcaaagttcataaaaaagactgtccgaatgcgattggcatgcagtccaattatgcttaccgtattatgagtgccaaatggattgactcttctcaggaagaattcaaagccattatcaacataacaggaatggacgttttaggacttaccaatcaattgaccagagtcatttcgaacaacatgagtgtaaacatccagagcatttcgttaagcactgatgccggaatttttcacggacaaattgctgtcatcgtacagaacaataccattttgaagaaaatgatcaatgccattaaaaaaattgacggagttgataaagtaacaagagagtacagaacttaaaaattgtttatggtttttggtttgttgtttcaggttcacgaagttcaaaagccaaaacaaaccacgcataacttttttaacctatctataagggttttataactaaactttaaacccgaaacttttattcattaaaaataaaaaattatctttgccggatatgacactcatttcaactgacaacactagaaatcaagaaattgtaaaaaatgtttttacactgtatcttgagcaaaaagggcatcgcaaaactcctgagcgttatgctatacttcaggaaatttacgatagcgaagaacattttgacatagaaaacctatacatcaaaatgaaaaacaagaactatcgtgtgagtagagctacattgtacaacacgattgagcttttgttagactgcgctttggttagaaaacatcaatttggacaaaatcaggcttactacgaaaaatcatattttgataaacagcatgatcatattatcatgacggattccggtgaggtaattgaattttgcgatccaagaattcagaccatcaaaaaaacaatcgaagaaatatttgatattgaaatcacaaatcattcgttgtatttctacggaaacaaaaagcaaaaacaataattccgaagggtcttattcagaaaatataaaaaagaaaattaactacattaatcagtggggcaacaggaattgcctcaacgcaaattaaaaagagaatgaccgtagatttattactaggattacaatggggagatgaaggtaaaggaaaaattgttgatgtacttacctcaaattatgatattattgcacgttttcaaggaggaccaaacgcaggacatacattagaatttgacggaattaaacacgtacttagaaccattccttccggaatttttcataaaaaatcagtaaacatcattggtaatggtgttgtaatagacccggtggtttttcaaaaagaaatcgaaggtttagagaaatttaaccttgatatcaaaagcaaactgatcatttcaagaaaagcacatttaattttaccaactcaccgcttattagatgcagcttctgaagcatctaaaggaaaagcaaaaatcggatctactcttaaaggaattgggccaacttacatggacaaaaccggaagaaacggattgcgtgttggagatattgaactggaagactttaaagagcgttacagagcattggctgacaagcacgaagccatgattgctttttatgatgttgctattcaatacaatttggctgaacttgaaaaagagttttttgaagcgatcgaagaattaaagaaattagattttattgatagtgaagaatacatgtaccaggctcaaaaagcaggtaaatcaatcttatgtgaaggagctcagggttctttattagatgttgattttggaacttatccatttgtaacttcttcaaacactacagctgccggggcttgtaccggtttaggaattgctccgaacaaaatcaaagaagtatatggaattttcaaagcttacgttacacgtgtaggtagcggtccattccctactgaactttttgatgaagtaggtgcaacaatggcaaaagtgggtaacgaatttggatccgttacaggaagacaaagacgttgtggatggttagatttagtagctttaaaatatgctgttcaggtaaatggggttactcagttaatgatgatgaaaggtgacgtactttctggatttgaaacgttaaaagtctgtactgcatacaattataaaggtgaaaacatctctcactttccttacaacatcgagcctgaaaacgtaactcctgtttataaagagtttaaaggatggcaagctgatttaacaggaatgacgacttacgatcaattaccggttgagctaaaagaatatattgagtttattgaagcagaagttggagtaccgatcaaaattgtatcggttggaccagacagaaagcaaacaataacaaaataacacctccaaacgctctgataatcagagcgttttttttacaccaaacatttctaatgatgaaaaatccaaaaattaaagttaccgaaacccaattattatcagacaattggtacttgctgaacaaagtaacttttgattatgaaatgaaagacggcaaaatagaatctcacattcgtgaagtgtatgaccgcggaaatggagctgccattttattgtacaacacctctaagaaaaccgttatcctgacgcgacaatttcgtctgccgacctatctcaacggcaataaaagcggaatgatgattgaagtttgcgcaggacttttagatcaggatcatccggagcaggctattattcgcgaaaccgaagaagaaaccgggtatcgtctgcagaaagtagaaaaagtaatcgaaacctacatgtcaccaggatctgtaaccgaaattttatatctatttatcggagaatatgacgagaccatgaaagtaaacaacggcggcggattagacgcagaacaagaaaatatagaggttttggaatacacctttgatcaggcttatgccatgattcaatcgggtgaaattacagatgcaaaaacgattttattgttacagcatgccaaaataaaaggtttgatttaaataagggattttttattatttttagactggaattaagtttttcttttaaaaaatatagctaaatttcagtctaataaaaacaaaataccggaaaatgaaactaaaatttttactcctttttttaagcctcaccctttactccttctcacaaaaacttcaacgaaatgtttttgagtacgaaaaattaaaatctgataattttgacttgtgcgacgaagccgttaagaaagaacaaaaaaacattttaagaaagcttgaagaaaacaatagtacaaatgctgtagtcctttctaaaaaactttatgaaaccaaaaatgattgttttggaacctttgaaagttatggatattctttgtttcgaaatggacaatggcttgaaggaattgacattattgaaaaaggaattgcgaaatttggaagtgttccagaattaataaaaagaaaatctgaaatgagtctggaaatggcaaaactaggtaccagacaacgaaatatcgatggaaattccgtttttaaagccgattctctccaatatgacgaaggtcaatttaaagaagaaaacctaaaatctgctcttattgatctagaatatctgatcaaaacatataaccgaagcgaagaaatttattatgcagctaaaattcaacaacttttaaccaattacgacaaatcaaatgaaacgttcaaagcgcttttgaatgatgaaaaatataaaaacgctgctctattcaatatagctgacaattatattgcactaaaagattataacagtgccgaaacagaattcaataaaatactggtagacaatcctaaagaagctgcaatttatgataaactagctgaaatctataatttcaaaaatgataaagtaacagcatcagaattaactaataaaagtactttctacagaaacactcctgctgattcagatctggaatacagcaaagaaaacttcgaattacttcagttttttgggacagataaaaacaaacccggtaaaaaattaaaaaaacttcaagaaatctcaagccaaaacaaacagcaatatacaatagacgtctgtttgatgattttaaaactacatgcaaatcatggaaacggtgttgaagaaaaagcaaccgaaatattaaaaaatatcggaaagccttctatagaaaaagttaataaactttttcaaagtaacgtctctacctgtacgattactaatttggccgatattatggcagcagtaaaagatgaaaattcatggaaacttatgaaaaagtatctatcctatattgccaatatgccagtgacattaattccgccaaatttaccggaaaaaatgattcagtttaatgaagacaaaggcataacagaaatccttataacagtaaaacctttgctcgcaaaagaagacaacaatgatgctcttagtcaattggcaggatttggacactatgtttattattctcctttaggaaaagtaaataaagaaaaactaaaaaaaatagcaactgaattaaaatattcggataaagaatttagtttgttacaagacaaaattaactagtcaaaaatcagtacttagatcctaaagcccttgaaatgtcaaaatttaaaacattactttttctgttttttccgtttcttctcttttcacaaaatgaaaaatggcctgctgcaaaactaaaacaggatttatcaacttttaaagagattagagaaaaagccaattcaggagtttataagtaccgtacaaagaaacaaatagacagtatttattcctgggcgttttcagaattaaaaaagcctaaatcgctactggatttctataaaataatcctcaaaatcactgactttgaaggcagcgtacacaataacaccactcttcctgatgattttcaaaacaaatacacctcaggaaaagttttctttccgtaccctgttaaactaattggcgataaagtaattatcaattttaagaatactgaaattcccgtaggctcgcaaattcataaaatcaatgacattaaaatcgagaaaatactctctcgtttctataaatattacacgacggacggttataatctttctgggaaatcaatcggaatcagtgcttcatttggaaggtatttcgaactggaattcggccccaaagagcattttctagtcgactattcacttcctgatcagactcaaaaacaatccaaaaatgttcttgctgtttcaaacgaaaccagaaaagataattttaaaaatcgtcattctctgcctgtagacagtctgcattacggcaaaatcaaaaataaatatacttttaagatatgcacaccccatacagcattactttctatacctacttttgccattggcatgaatgcagaagacaaagagcatttagtctataaaaaatatctggacagctgctttcagtttctctcgcttcatcccgaaattaaaaacttaattgtagatgttcgcagtaatggcggtggaagtgaccccaacgatcttgtcgctttttcttatctgacacaaaaaccgtatcgggaaaacacatccgcatttatcaattttcaaaaaattccttttccccaatattttgtttacgaagaaacagagcccaaaaaacggtcggaggaactaagtgagttcgaagcggaacttaaagaagaatacccggaattgaaaggcaaaatatatctgcaggatcccaaattcaatcgtttattacagcccgacaaaaacaactttcaagggcagatttatttattaattagtcccagaatcgcatctgcgggatcactgtttgcttctttagttacaggccatactaatgctatagttatcggcgaagaaacaatgggcggttactatggccataacggacacacgcctgtggaatatgaactcccaaatacaaaaataaaaacgcaattttcgattgtcaacttagaacaggatgcccctaagaaacccaatcagatttttggcaggggcgtaattcccgatcatgaagtcaaacaaacaattgacgattttgtacaaaataaggatactcagtttgaatatactttgaaattaattgagcagaaataaaatgaaattgtttaagaataaaattttaaggataatactattcatttttatacttatgaatagtattgctatttttcacgcctataagtttactcattttacagaaaataacgcagtaaaaactaaaagccccgagaaattatctctaattgataaagcaaaaactctattcctgggagtcaataatcctaaaccaaaaaacaagaaagctccaacccaaaaatatcagattttaaaccttaaaagcaacaaggaaattgaatgctggtttatcaaaaataaagaacccaaaggaactgttatactttttcatggttatggaggagaaaaatcctcaatgattgaacgatcaaatgaatttatcaaattaggattcaatacagttcttgttgatttcatgggaagtggaaattctgaaggaaatcaaactacaattggttttaatgaggctaagcaggtaaaaacttgttttgactacgttaccaagacaggagaacaaaatatttatttatttggaacttccatgggagctgtttcaataatgaaatgcataaaggattataaaataaatcccaaaggtataattatcgaatgtccctttggttcaatgtacaaaactgtctgtgccagatttaaaaagatgaatgcacccacatttccaatggcgggtttattagtgttttggggcggcttacaaaatggcttttggggatttagccacaatccgacagaatatgcaaaaaatatctcctgtccggttttattgctttacggagaaaaggataaaagcgtaagcagagaagaaataaatgcgatttataaaaatttaaaaggtcaaaaaagaattaatatctataaagcaaccggacatgaaaattatctaatcaaaaataaaattcaatggacaaaagatgttacaggatttataaattcggtacagtgaaaaattgtaaatgaaaatccaacaaactattcaggtaattgtataaacgatttgactagtaatcaaataactttactagtataaaaaaaacaattatgagaaagttacgatacccctcaagtattttactactgatcgttctcgttttaataacttcttgcaaaaaaaacgaaactactgaatctaagagcaaagtcaaaaaaacgatcgagtataaaaaaccaaagtcagtctcttatcattttgaaaacaccaaagaatggcttaaaaccaatgcttccgacagcagtaaactccgcattgcctgcgctctaaaccgaacagaccgaaaaaatttcgtaaaaatggattcggttattattccagtcgatttcagcggcgatttggtgtattatcttccgtttcctttgcacgttaccaccttagaagaggtctcaaaagtgattctcttttcttatccttctcaggcatttgctgcttatgaaaatggagcactaatctatacaggcccaactaatatgggaagaaaaaaagatcctactccaaccggattattctttaccaattggaaagccgaaaaaacaaccagtaccttcaatgacgaatgggacttaaaatggaattttaatattgaaaataaactgggtgttggatttcaccaatatgatttacccgggtatccggcatcacattcttgtttgagattacaggaaaatgacgccaaagatctttacaaatgggctgatgaatggatcttaaaagacagagaaaatgtagaaataaaaggaactccggtaattgtttttggtaactacccatttgatgcaccaaaaccctggtatgcattagtaaaaaaccctaaagtacttgatctctctgaatcccaaatagaaatgcagatccggccttttttaaaagaaatactggaaaatcaaaaacttagagaagcgagacaaaccactacaccatagccctgttttataaaaatgcatatcactaaaatcagtcaaaaccacttcttaaaaggttctggctgattttttttataaaatttacgcccccactgagcctttgaacctttgcgtctttacatctttaaaactatttaacatgtaaatgaataaacgttcatttattatttatatatttgctgcataattaaaaaacaagacatgaaacattcccttataaaaaacaaaaagatcgccattattggtggcggacctgttggcttaacaacagcaagaattttacaaattaatggcgccgacgtaacggtatacgaaagagatttgaacgctcaggccagaacttcaggcggaacattggatattcatttagattctggtcagaaagcaattgaaaaagcagctttaatgggcgaattctataaatatgcacgtccaaccggtgaaaaaatgactgacctgcacggcaacattacttcgactgaaatgcctgatgaagaaaatgcctatacccgacctgaaattgaccgtaatgatttaagaaaaatcatgctggagaatctaaacgaacatacagtagtttggaacagtcatttaacccatatggagaaaaccggagcgcaatatcatttagaatttaagaatggtaccactgcaatttccgatttcgtaattgtagccaacggcgggagatcaaatgccagaaaattggtaaccgatctggaacctcaactttcaggaacgtatatcattcagggagaaattgccgatccggatcgtgattaccctgaattcaaacctaaatatggcaacggaaatgtaatggcaatgggggaacaaaaaatgttctacacccatacgttacgtgacggttcggtacattttggagtttctttcaaagcagatgaaaattggatttcaaacaacggaatcgactttgaagacctcactgcagtaagagtttttttgaatgaaacctttaaaaactggagcgatgattataaaaaattctttaacgcagcaactgatttttccggattgcctttacgtttgttttcattagaagattcctggaaagaacactccaacattacacttgttggagatgcagctcatttaatgcctccctttgccggtgaaggtgtcaatatgggattatttgatacttatcatttaaccgaaaacttaaccaacggaaaatttgcaacaattgatgacgctattaaagattacgaggaaaaaatgtttggttatgcattaggagctcagcacatgacaaaaaaaatggaagatttattgcattctgatatttcatctgaagatattttgaacagccgatttgaagtttaaacatcttatttacaaaacaaaaaaaggcgtaagatttaaaaccttacgcccttttcttaatttataacttaacaaatcaggatttcaatttcatttaactcaatttgctttcgttttattccataaacttttttaaacaaatttaaaacactaaaaggattagcgcccaacattgaataaaacaccgttaaatcttcataattatgaaccgaaattttaaatgttgacttattattaacttgaaaactaaaaaatttcacagctctttttccgtttttataatcccttccttttaaacttttttcattcaaaagaatagactcatttgtttttaaatccagaatctcaataaaaaaatcaggatttgcccgtacatcaaaacctcctaaaataaaaatttcataaaacccgtaatataaatcaacttcgagaatatcatttaacttgaattgtaaattcatattggattatctggaataatttggagcttcttttgtaatagttacgttatgcgggtgactttcagtaattccgcttgaagtaattctaacgaaacgtccagattcctgtaaagttggaatatcttttgaaccacagtatcccattccggcacgaagaccaccaatgaactgaagcatactttcgtttaattcacctttataaggaacacgccctacaattccttccggaactaattttttaacgtcgtcctcaacatcctggaaataacggtctttagatccgccttgcattgcttcaacagaccccattccacgatacgatttaaattttcttccttcgaagatgattgtttctcccggagattcttttgttcctgccagtaatgaacctaacattacacaatcagctcctgcggcgatggctttaggaatatctcctgtgtaacggattccaccatcggcaattaccggaacaccacttcctttgatagccgcagctacttcaagaactgctgagaattgagggaaaccaacaccggcaacgatacgggttgtacagatagaaccaggtccgatacccacttttacaccgtcagcaccgctttccactaaatatttagcagcttccggagtcgcgatgtttccaactactacatctatttgagggaattttgattttacttcttttaatacattgactacaccttcagtatgtccgtgagcagtatcgatgataattgcatcaacacccgctgccactaaagcttccgctctttgaacagcatctccggttactccaattgccgctgccactctcaagcgtccgtaaacatctttgttagcgattggtttttgagtcagttttgtgatatctctgaaagtgattaaacctactaattcattattagcatttaccactggtaatttttcgattttatgcccttgtaaaactacttctgcctgctctaatgaagttccttcagcaaccgttactaagtttgtactagtcattacctcagcaattggtcttgctccatttttttcgaaacgcaaatcacgattggtaacaattccttttagtattttattctcgtcaacgattggaatacctccaattccgaattctttcattgcatttttagcatctgcaacagttgaatttgttggtaaagttaccggatcgataatcattccagattctgcacgttttactcttctaactttcgcagcttgttgctcgatcgtcatatttttatgtaaaacacctattccgccttcctgagccatagcaattgccatagaactttccgtaacggtatccatagcggctgatactattggaacatttagcgttatatttcgtgaaaactttgatttaatgctcacttcgcggggaagcacattggagtagttaggtactaataatacatcgtcgtaagttaaaccttcgccgataatcttggagttgtgtgctatcatggtgcaatttctagttgaattgcgtgcaaatatagtaaataaattgataacttggatgctaagttattcttaaatttatagttaaggaattaatcttacaaatgaacagtatgataaattccaattattagaacctaaaacctgaaacttgaaacctgaaacttggattttttaaaaacattattcttccggattatcattaaatataaaattaaatccgaactgaaatgccatactattggcctttgaaacatcttttaattctaagaggttattgaccagaacatacatattcagttttccaagtgtacctgcaagtcctaaaccaatatttttattcgaataagaatcaactgtataagtagctttcacatctaatttttcgaaaatactgcgtctgtaaaaagcggttaatgccacaaaaggctctacaggcatagacattgcaaacagctgtcctcctacaccattgacatattttcgggtgactttaccatggcaattacaatcttcatcagaacgtgattcgccaaaggaatactgaagggaagaatagagttttgttggtctgagggtggtgtacttattataaagtgtatcacgaggtatcgctttatcaaaatcatcaaagatgttctttggttcatttgaattatcaaaattcggattcacaccttcatagtgatacgttcctttataggttaaggtttcgatatctttagactgtctcacaaaacccagatcaacaatacttgcggtaagctgaagattatctttaaaataataagtaaaaccggcatcaagtcctaaacctaaacttccgttaaaaaaagtgttgcgcacaatatcacttggaatactaccgtcgtactcgtcttttgtaaatgtagcaatcccggaagtctttatctgtacgttagacgaaatggcttgtgtatataaattaggagttcccgcagcctgaccggtataaatgtatcctgaatttcgggttgatgttacatttgctccgcttgagtaaattttggcgcggccacctaaaaccagtttctcacttatttttttatgaaacccaacatgaaacacagaaagcatttcggctcttaaattcaagtcggacaaattgaaagcctttccaatgtaatctttatttccgtctagtgccaatatagcgggatccttaggaacgtacattaaaaaatcaaattcctgataaactccaaacgaaagatacgactgactgtcttttcctccaattctgaaaccgcctgaaaacagttccagctgctgattgatctgcgttttatctctactggatgatttattaatcacgtttcgaattttatcattgaaatttaccccgttattcgcaaataaatcataggccgaaaagctgcttgatcctaaatttgctgaaattccggataaaacaggaactccaaaatagaatttataagcgacatctgctcccggatttacaagtgaagattgcggaatggcggtaaaattgtacagtacttctttattttgagcaaaacaagaaagctgaaatacgactatcagaactaaatataattttctcattgaattaccatataagcagttgcacttgagcgtaattttaaactgcctgtactgtttccgtttaaaggcggacctggcgccataaccactacaaagccaagtttacgggtctgtttcaataaatctaatcgttgattttcgaatacttcagtaggatattttacaacatttgttcctcctgagtaagcaggaactgccagtgttatggtttgaagaatttgatcgctgccacttaaaagcaatatattgagcgtaaaggctctgttgatcgtattctccatttcaaaattaaattcggctttaacgagatgatcgttgaagtatttttctttgaaaatatcaaattcccgaacatcaaatcctatttgctgttcggtaccgttatcgacaaaggaagctgccggagcattaaaataagccaaattcgctactaaagtaggttccagcttgaaatctttagtctgatcaaaatccagatcactggaacatgatgaaaataggacagataaaaatagtatctgagaaattctctttatgaaatttggtctcatggctttacatatctaaatactaacaacgatactttgatactacttattattctaaccctttgcgtgtaattatttttaaacacatagaaacatagatttttaactctaaaaaagacgtttcacttatttaaaacacacagagactactatgtgttaagcattttttattaattaaacccaataggttcttttatttttataagtaaatataattattttctaatgaaattttccaaacaattttgatgcttcattatacgcgctctcaaaacttaaagagttcaaacctgtcacttttttattggatgtaaaatacgaaatcagcttttcggtaggcatattacccgtgagtttatctgttgccatcggacagcctccaaatccctgaatagcaccatcaaaacgggtacagcctgcattcgaagctgcctcaattttctcaaaccagctgtttggtgtcgtatgcagatgcgctccgaattcaatctgtgggtattttggaattaaattggaaaaaagatacgtgattacctccggtgtagaactaccaacagtatctgaaagtgacaatatcttaacccccattcccgcaagtttttccgtccattcgcccacgatttctacattccaagggtcaccgtaaggatttccgaaacccatagaaagataagtaactacttctttatttttctgatcggcgatttcaagaatttcttctagcgtgattaaagattcagcgattgttttatgtgtgtttcgcatctgaaaattttcggatatcgaaaaaggaaatcccaaatattgaataggttcatgtgctgcagctagccctgccccttgtgtattggcaataatcgctaacaatttgctcgttgtttgcgacaaatcaagctgagctaaaacttcggcagtatcctgcatttgaggaattgcttttggagacacgaaacttccaaaatcgatagtatcaaaccccactctcaataaggactgtatataggaaaccttatttttagtaggtataaaagttttgatgccttgcatagcatcacgtggacattcgataatcttgatttctttattcaaagcttattcttttatgcaggctaagttagtttcttttttaaagaaataaaagttataattttctttaattgtattacacgatagggtaacactttaatatgttacacaaaaacgtaacaacttacaatgttacacaaaaacgtaacattgaaaaatattagctacatttgtagtactactatgtcgtaaggcgtaattagcaaaaaaaaaaaaatgaaacaatatttataggtctaaaaaaagagcagaaaaagaaacgaacttctttcacctagaaaaacaggtattttgagatgaagtgaaacgccttttctatggatacaaaacttatgtaaccaggtattaaacaaatcgcgcacaataacttattaatattattctttttatttatatttgaaactatgactagtgtaattacaggagatataatcgattccagaaagcaaaaatcaaaagactgggtagaatctttaaaggaaatcttagcttcttttggagaaacacctctccaatgggaaatttacagaggggatgaatttcaaatagaaataaagaatcccgaagaatctttattggcagccctcctcattaaagcgcatttaaaagctttaaaactggatgcccgaatgagtattggtattggagataaaacacacgatgctgagaaagtttctgaaagcaatggttctgcctttatacactcaggtgaactttttgagactctaaagaaactaaaagtaaatttagccttgagaaccgacgattcggctgtcgatgaaaaaataaatttaatgcttcagcttgctcttacttttatagataattggtccgctcaatctgcggaatttgttgcaattgcgatagaaaatccaagtttgtcacaagaagaattagccccaaaattaggaatcaaaagagctgccgtaagccgaagacaaaaacgggcacagtttgatttaatattgagtttgaaccgctatttcagaacacaaatgaaccaacttacaacactatgattgtatttataaaactacttttagcacatttactgggtgattttacagcacaacccaactcctgggtagtcgataaagaagccaaaaaacacaaaagtatttatttatatcttcatatttttttacatggcattttagcagccgttttagtcggagaaattcagtttctcccttacgctttgctaattgccgtatcgcatggtgttatcgatttaatcaaactccatttccagaaaaacaaaacaaaacgcagttggtttgtagcagatcaggcgctacaccttttagttttgattggggttgttttgctctacaagggcgaaaccgttcattttctgtggctcaacaatcagttttggattttagctacaggatttttattcattacaaaaccaacttctattctgattaaaaccattatatcgatctggaatccggaaagtcaaaacagccacaatgaaaactcactttccaaagccggaaactatattggcctattagaaagattatttgtcttctgttttattctaacgggtcatttcgaagccattggtttcttactagccgcaaaatccatttttagatttggcgatttaaaagaagccaaagaccgaaaactaacggaatatgttttaattggtactttgatcagtttcggaagcgctattgctacaggactaatcgttcaggtactgcttttacaattgctttaaaacctttttattgattgctttgatcaaagccggtccttcataaataaaaccagtatacaattgtaccaagctggctcctgcattcaatttctcgattgcatcatcggcagtatgaattcctcctactccaataatagggaaagctttgttgcttttttccgaaagaaaacgaatcacctctgtcgagcgttttgttagtggttttcctgacaatccaccggtttctactttattggcagattgcaatccgtcacgtgaaatcgtcgtattggtggctattacacccgcaatctgagttgtttttacaatatcaataatatctaataactgctcgtctgtaaggtcgggagcaattttcaacaaaattggttttaccttttgtgtgcttgttttttgtttctctatattcctgttctgaagcgtttgcaacagagccgtcaaaggttctttgtcttgcaatgcgcgtaaatttggtgtatttggcgaacttacattgactacaaaataatctacgtgatcaaacaaagcatcaaaacaaataatataatcgtctaccgcattttcgtttggagtcaccttgttctttccgatattacccccaatcaaaactcctgaattctttttcaaacgctctacagcttccagaactccgccgttgttgaatcccattcggtttacaattgcctgatcttcttttaaacgaaacaaacgttttttaggatttccttcctgtccaacaggagttaccgtcccaatttcgataaatccgaatccgaaatccgataattctttatacagcttggcatctttgtcaaatcctgccgccaaacctaccgggtttttaaatttaattccaaaaacttcacgctccagacgactgtcttttacttcgtaaactgatcttataattgatgaaactcccgggatttttgaaatgaatttaacaaatgaaaaagtaaagtaatggacttcttcaggatcaaacccaaaaagtatcggacgaattatcaatttatacatagtagtgtgttgttgttgtttttttgggtgcaaatttaattataatactttgaaaatgtcttctttttgctaaaacaaattacatcgggttttgaccttatatttctatgttcaaatgatttttgccgcaatcaaaagtcctctttctcataattttattacatcatcagaaacagaaaacgaaatccttaaacaccacaactgcaaaattgaactacaactactaccagcaccttaataaagcagcaataaaaaacactactaactccataaaataaatagagtttaaaaagatcactttataaactttattcttaaatttacccgcaactactattcgataaacacattcgtcatgaaaaataaaacgcattggatctttgccattctaaccctctctgctattacaattgcttacggctatacaaaacttatagtaccgaaacaaaagttaacgacgatgaattgtgacgaggttccaaatacaacggaggaatcattgtttaaaccaacaattgagaacaaaaacaaacctgtcggtaaagctcctgcagggatggtatggattcccggtggagaattctctatgggaagtaatgttgaagacgaaagtttgtgcagtataaaaggagtaaccaaagatgccgccccgatacaccgcgtttatgtggatggattttacatggataaaaccgaagttacaaacgaccaatttgaagcctttgtaaaagcaacaggttatgttactttagccgagataaaacccactcatgaagaatatcccgatgctcctttggaaaatctcattgcaggatcggccgtgtttactcctaccccagctcaggttgatttaaacaattatatgcaatggtggacttatgtgcatggtgctgactggagacatccggaaggagccggaagttctataaaaggaagaggcaactaccctgttgttcagatttcctacgatgatgccgctgcctacgccaaatgggtcggaaaaagactgccaacagaagctgaatgggaatttgctgcccgtggcggaaaatcaggcgaattgtatgcctggggaaacaccttaaaaccaaaaggaaaatttcaagccaacatttatcagggacactttcctctggaaaaaggagacactggcgaagacggttatattggcattgcaccgaccgctaaatttgcccctaattcttatggtctttatgatattggcggaaatgtatgggaatggaccaatgactggtatactgcagactattacgaaataatcagcaaaaaagatcaggttgttaaaaaccctcagggccctgaatcttcttatgatccttcagagcccggactacccaaaaaagttcagcgtggcggatcctttttatgcaccgatcagtattgtacccgctatatggtaggcaccagaggaaaaggagactacaaatcaccggccaatcatattggttttagatgtgttcaataagatttttttagtccctaataacataaattaaaatctttgctatactacttacaaatccaatttcacaaatttaaattcgtgaaattggattttaactttctaaaattagagcaaatcagtaaaatttgaagcaaactttttttcagcctaatttatagttttcataatttgcagctttacaacccctaactatttcttcagatgtaaaaactaacatatattaattactggttgaaaataaatgtaatgacagttattttatttatgaatatctattctttttaaatcgaaatcaaaatccagtagttcctttggatgaataccaagacccgttgctatgcttaccaaagtctctagagttggatttccagtacctatttcatatttatgataattacttgagtcgaacttagttgtactatccactccactgagtgtttttattttttccgctctaagcttttttaaattttcgccaaaggcttttttataagccttcaatagttcttccttagccatattacttaaatttgaaagaacaatatttgaattttattaaaaatatttatggtgatatatcaccataaatattttttttcatatatttgtaacaattcaattgaaaatgaattaatatatttgcgattcttcaagacaatattgaagcattcgctttgaatctcgtttcagaaaattggcgtttttacaaccacgagatgataagtaagatgctcacgacctatgggcgtgggctcacttatttgtggttgggtatgccaatgcctctgaaacgataagctgagttctgcgcctttttttttgctcaaaactctcttactattcttagcgctcacttcatgattttctttaagtttcgcttccaaaaagtcgaacatattaaataattcattgcctgtgtattaaaaatctcccttatgcctattaagccgtttacttaatacataaaaaaggccctctactgcagcgaccaaactatcgtagaggaccgtagctaatcaaatccatatttaactaaccaatcccaatattatgaattatttttcattttacaaggatggaagagctctttattgcctaatttttatgggcattaccttagctttttcgtcaactcatgccgccagctcaaaacggcatttcaaatttacacctcaacaatttcaggtcaacggaacagtaactgacggatcgggtcctctgccgggtgtaacgatagccattaagaataaagtgaattccacagcaatttctgattatagtggacagtattcaattacggcatcaccatccgatactttaattgtatcttttatagggtttaaaacttcttatattcctgtcaatggacgaaaaattgttgacgtcaaacttctctacgatacaaccacgctgcaggaggttcgggtgaatgctggttattattccgtaaaagaaagtgaccgaacagggagcattgcccgaattacctcgaaagattttgaaacccagcccgtgactaatgtgctggccacaatgcagggccgtatggcaggagtaagtatcacacagactacaggcgtgcctggcggaggttttgatataaaaatacggggacaaaacagccttagatctgaagccaattcaccgctttatattattgacggtgtgccaatctcttcagatcctattggctctttttatacgggaaccacatttcctacattggtgagccctatcaacagcattaatcctgatgcaatcgaaagcattgaagtgctcaaggatgctgatgcaacatctatatacggttcaagaggagcaaatggtgtggtattgattaccaccagaaaaggaaaagcaggaaaaacaaaatttaatgtttctgcttccacaggaactggcagggtaactaaatttcttaaccttatgaataccgaacagtacttggctgtccgcaggcaggcctttataaatgatggcagaacttcatacggtgctacagattacgacattaacggcatttgggatcagaatcgttatactgactggcagaaagaacttatagggggcacttcattgatcaatgatctgcaggcatcagtgtcaggaggttcaaacaatacccaatttctattaaatggctcttatcatacagaaacaaccgtttttcccggtcagtttcgatataaaaagggcggaagcaattttagtttgaaccacaaatccgaagatgaaaagttttcacttaacttctctgcgggatttaattcacaagataacaacctgccttcttacgattttacaagcgatgccagaaatcttcctccaaatgctcccgccctttatactccggacggaaatcttaactgggaaaacaatacttggcagaacccgcttagaaatctaaacacaaaagcagaatctgctgttaatgatcttacaggaaatgctgttctttcttatgctctaacaggagagctttcagtcaaaggaaacttcggattcacttatcttgacaataccgaaactagaattgttccatccactatatataatcccgcatttaatgtcggaccttcacaatcttctattttcacgaatgatgtaaatagatcttcttggattgtagaaccgcagataaactggattaagcagctgaagaatgctaaaattgatgtacttgttggttctacttttcaaagccagcgcggtacaaaaatatccaattttggatcaggcttcacttccaacagccttatatacaacttagcagcagcgaaaacggtaagggtactgctggatgaggaaacactgtataaatatcaggctttctttggacgaattaactttaattatcaacagaaatatatcgcaaaccttaccgctagacgcgacggttcaagcagatttggaccaggcaaccagtttgcgaatttcggggcattgggatttgcgtggctgttttctaacgaaaaatttctccagaattcgaggtggcttagttttggaaaaatacgaggcagttacggtaccacgggaaatgatcagattggcgattatcagtttttcgacacttattcagtcaatggagtactatataacggaatttccggcctttcaccgacaaggctctttaattccgattttggatgggagacaaataaaaaactggaagcggcacttgaagtaggtttctttaaagaccgcattttcacaaccgtggaatggtatcagaacaagtcttccaatcagctggtcggtattccgcttccgggaacaactggcttttcatccatgcaggccaatctgaatgcggtcgtgcaaaacaggggaattgaatttacattgagaaccgtcaattttaatagcggaaattttaactggaccaccagtcttaatttcactcttgctaaaaataagctcctttcttttcctaatcttgcaagttcaacctacagccagcagtacagggtcggacagccacttaatatacagctcttatacaaattcaacggagtaaacccgcagacgggaatctatcagtttgaagacctcaataaggatggacttttgacagctgctgaggataagcagataattgtggatttgaatccaaaattttacggcggtcttcaaaataggctggcttataaaggtgtatcgctggattttctcttccagtttgtcagtaaggacagcaaagcctattcaatgtcgtcagctggaacaatgtcaaacaagcatgtcaggcttttggaaagctggttttcgcagggagatactgctccatatcagatctatacagcaggatttaatagtgcagcagtaactgcaaacagccagttcaatcaaagcactgcctctattaccgacgcctcctttataagacttaaaaacattgccctttcatataaactccctttgagcctaaatgatacgcaatgcacgataatgcttcagggacagaatctgctgacttttaccagatatgatgacggagatcctgaatttacaacctatggctacctgcctccgctaaaagtaattacggcaggaattcaattaactttttaatatccggttatgaaaacaaaatttttatttacatcccgatttttaatttctatgattctgtttatcgctgtttcctgcgattcttttgtggaagtagacctgccaaaatcacaattaaccacagattctgtttttgaaaattacagcactgctgaagcggctcttaccgatatttattcaaaaataagagacaggggaatgctcaccggtgatggcattggaatttcgaatcatctttcctgctataccgatgagatgataagcaatgagagtgtgtcaaatccaagtttcagcttttatgctaatgcactccttgataccaatactatagttgcggactattggaattctgcttataatcagatttatgcggccaattcaattatcagcggttgtgaacacaattcgtcgctgacgcaggcccaaagagaccagctgaccggtgaagcactttttattcgttctctggagcacttttatttattgaacatttttggaagcgtgccgtatgtttcgggtacggattacaaaacaaatagtaaaatttcaaaaatggctcctgaacagatgtattcaaaaattatctctgatctggaaactgccgtagatctgcttcctgaatcctatatagctgcacctcgcgttcgtccaaataagtatgctgcaaaggcgcttctgtccagaatctatctctttagcgggaaatttcctgaagcctcaaatgcaacatcagcggtgataaataaccagagcctttacgccgttgaaaatataaactctgcatttctcttaaactctaaagaaacattatggcagcttcattccggtaccgctggcaaaaacgccgctgacggcgcttattttatatttaccgcgggccctccgcagtttgtatggctgagcagtatgctgtacaactcatttacggcttctgatcttcgtcgaacccattggataaaagaagttaaagatgcatcgggaacatggtatcatccctataaatacaaggagaattttgacacatcagtttcaaaggagtacacagttatgctacggctttccgaacagtttttaatacgatctgaagcaagggctatgcagggggatcttatcggagcaaaagaagacctgaataaaatcagaaaaagagctggcctgccagatactcaagcagtgacacagagcgaaatacttgatgccattcttgaagaaagaagacatgaacttttcacagagtacggccaccgcttttttgatcttaaaagaaatggaaagcttaacagcgatctcggaaatataaaggccggctggaattcctctgatcaggttttccccattcccgaggcagaaattaatgcaaatcctaatctaaaaccgcagaatccgggatactaattacaagacttatgattacaacatatttttatcgaagattatgtgcctttagggcattgtttttaccttttttagttttattttttattttgccgttagtatcctgtcccttatggggacaggtggtgcaaaaaaagaacctgaagcctaattcatatgcgcaatggggtgatgtagtacttgataaaatatcgccaaaccagaaatgggcaagttttagaatgagatacaaaaatggcaacgatactttgtttgtgcgaaatgtcgccagccttaaaaccttcagttttcctgctgccaaaaacggcggtttctcttctaactggctgtttttctgccagactggaaaagatctgattatacttgacctttcaaatggaaaaaaagaaatcattaaaggaataagtaattttagctactatgaaaaaaacgacaagctggtttttctaacttcctgcgaaaataaaaaccgcacacttacaattcgatcattaaaaactggcagtaatagggaaatcagcaatattgaccagttctcactcaataaagaaaagggtttactggtatacagcacattttcagaacacaaaagttccctttcaattgtcagcctgcagaaagacgaaacatctcaagttgctgaggggattcttcctttctccaacctcagctggcagaaaaatggactctcagtagcttttacggaaggaaatgatccgcagcatccgcaagttatttatcattttattgcatctgaaaaaaaactgcatgactttaaattcatgcctgaaagcaattctattattaatgcagatacagcatttgactcagaaagtccaattataatatcggacgatttgcagcgggtgtttttctctactgtttcttttaatcctcaatcagacaaaaacgaatcaaaaaatgttgagatatggggttcagctgataaaagaacgcacattcagcagcagaatgcaggcagattaaaaaaaggaagagttgcagtctggacaccggtcataaataaagttgtatatatcacatcatctgatcttcctgatctaattttaagcggtgatatgcgatatgctgttttatcaaatccagcagattatgaacctcagttcgagtacacagcaccaagagatttttacgtaatagatctgcagaactttgagaaaaaattattccttaagaacatcacacctgaacctcattattttaatgcatcaccagcaggtaagtactttacttattttaatgatggacactggtggacttataattttagcactggcattcataaaaatatcaccgctgaaattggcattaagttcacagctaaagagcggtctctggttcctgaatccgtctgtggcagtccagggtggaccaaaaatgatactgaaatactactgtatgaccagtttgatgtctgggcagtaagtcctgaaggaggttcttttaagaggcttaccagaggaagggaatcggacataatatttagaatagcaaaatcatatgataagcctcgttttaatcatttatttgaaggacagatgctagactcctttaaccttgataaggatttgattatgagtgctaaaggagacaatcaaaagaccggattctacagatggaataaaaaatatggagaaagttctattatttacaaagatgctttgtgcgaccagattatttacagcgacacaaagaaaaacattttctttagggagcagaaatttgatatgtctcctagattggcgttcataaataattcctcacttccccaatacttttttaaaagcaatccacagcaggacaaatatttttggggcaggtcggagcttattgaatatcaaaattccaaaggaataaaattaaaaggagtattatattaccccgcagaatataatgctctaaaaaaatatccgatgattgtgaatatctatgagcgcaagtcatatgaacttcatcagtaccaaaatccaacttattatttggaaggtggatttaatccgtctgtatttacatctgaaggctattttgtattgcagcctgatatcagtctcgaatttcaaaatccaggaattgctgcaaccgactgtgtgattagtgcggttaaaaaagttatagaattaaatgtcgcagatgaaaaacatgtcggactaatgggacattctttcggcggttatgaatcttcgttcataataacacagactgatttatttgcggcggctatagcaagcggcgccattacagatctggtctccttctattatactataaataaaggcaatggcagaccggatatgtggcggttccataatgaagaatggaatatgggcggcacgccttatgaaatacccaaagcgtattacgataattcgcctatcaattttgtacagaatgtgcagaccccagtgcttctctggagcggtaaaaatgattatcaggtggatactcaccagagcatggaattttatcttgcgcttcgtcgtgcaggtagaaaaagcctaatgcttttatatcctgatgagggccatggtcttataaattcagaaaaacagaaagacctggccttaaggacactgcaatggtttgaccactttttaaaagaaaatacaaaaagtgactggatcacccaaagcttaaataatggaagaaattaaaaacaatgcagttccaaaatggaactgcattgccatttaaaaatgcagattctaaatccatattacggattttgtttgtacagcggctgcacgcagtttgtgtccaaatcgtatgcgataggactgttgtcgtccacacggcaaagatatggactcggagcctcatcacatgcgattcttacattgctgcagcctgcagctgcattaggaaaatatccccatttgaaggcttcttcttttggagcactctgcatggaagtagtcgcaaacgcacctcctagcgccaaagcaataactgctgctggaatcatgtttttcaaaaataactttttcatgatttctaatttttaatttatataggatctacttttttctacaggtgttcgatcttcattcctgatactgatcagtatatttttaattctttgacttatattttttaatctgcttgctctttaactcgtaaaccactagatcagttccaattacggcatatagatacttcccatttaccattattgaacgaagctgttttgaagcagtatgaaaaactggaaaactcagcagatagctattccgctctatatcataaacatcaataataaagcaggtttcccaaagtttgtcactttcgtatctgcccttcacttttgaatttacaaacagtagatttcctgacattgcagcattttcatttaccacataagatggtgtggccattgcataacttttcccctcctttaatttggacaccttcatttttactttagatatggtgtcgatactatggccacggcgaataagactgccctttttatcagcaataataaattcgttgcggtaacgatgtacgtagacaattttcccgcttaattcagaataaagcagtataccgtcagtatcaaatacgccgtccacctgcttgtgaagcaaggctctgttaaacttagcttttggaacagtatgttggtcaaaaatcccaagcatattctgcatattttttgagctgttggatctgactgcgatactgctagaatcaattggctgcgcaattgtaaagtatgggctccccttcaattctctgtctactttccacttttttaaatcccctcttaaaacgatcggaacgctgccgtcagcgagatagaaaaaagggccttggatttttgtcgttatcatcttaaatggaattttctttgggtccattaatattttttcttcttttttgtcaataagcaatgcactataagactgtatgtacgaagggtaatcataatttgccagatatattctgccgtctgattcaccagctatgtaaaatgaattgtaccccagatttattttctttctaaattcagcaggatgctgcgggtagcgtctaataaatgggttatcatagtacattactttttctgatgaaagaaacaaaatcactaccgtaagaatacatcccacaatagttccaagaattgctttaatggttgtgcgatttctttttccggcagcattgctatccgccggtttggcgtttaatataatagccaatgcagcaagcgaaacaaaggctatattaaatataagatgtgtattccagctcattttctccagcacgccgccacaggaacaaggcacaaaagaactgtaatggagcagtataaaaatatatgccgtaaacatcgtcattaatcccagagaaaagaataacgctgtcatttttgtccgtcggttcaaaagcatcagagcgataagaagttctatgacgattactgcaggagaaatccagtctgcatatatgctaagcatgggagactgcccaatctgcactttaaaactttcaaaatcaagcagcttgcttattgccgcataaacaaacaataagatatacagataggatatggttaaaacaatattcttctttatggggccacttgaattcatatctcaaatattttgtattaagcttacttcttagatgtgaagctttttattatgcattacaaatttaaacgagataattcctatagatactttaaaaatcaagccaaaaactttgaaaatcaagcagttttacattttagctggcataaaaaataaatgcctgcactttgtaagaatcgcgcaggcattaaatcattgtaattgtttttgaaatcagccttttatcgaggcgctgattccggcaagtttttcgtgcagctctataagccctgctttttgcaggcactcttgagagagactctccagttctgtccttccctgctcgcttatgctctccaatagtaccgaagatccttctcttatcttcagcccgtcctgtatcaaatggcttaaaagcagcacattttttcgtgaaattttcaaatccattttcacaggctcattcatgccagggatactcagcaccgtatcaaaaaccctggctgcatcatttgctgtaatcataatttaccatttaaaattaatacttcgctcactgtaaaattataaagtatcatccctttttaccctactcaaaatttggggaggattgcaggacttagaggccttttctaatttagcctcaggtaaatccctagaacctgttcaattggtgcattttagatttttaaagcagattctgaaatggatttcctttaatttttaatagggatgacagctgcttcttagctgattgctaaagctgaaaaaagtcttttagaagctttcggactgtggtttttggcagtcagcaagatgtctggttgtatcacaaccaaaaatcttgctgcccctctgctcggaactcgctggcagtgaaactttaagattgaatgaaattgaaacaatgaaaaagaaaagatcatggaagagaaaaacagtagcagaaacagatggctgcacatccggctgaccaaagaagaattcgagcagatagacagaaattttaaagcttcagtctgccgcaaacgaagtgatttcgtgcgcagaaatctgctcagaaaacccattgtaatgagatatagaaacgagtcgctggataagctgctgcaggagcttatccagctcagaacacagctgaatttcatgggaaataatttcaatcagagcgttaaaaaactccatacaatttctgaaatttccgatttaagagtctggattctatcttttgattccgacaggaataaatatttttccctggttgaagaaataaaaaaacacattgaaaatctcgcccacaaatggttgcagtcataaacacaggacactcgataagaggcatcctaatgtataatgagaataaagtttcccggggtgcagctatgtgcatcggcgagggaaattatcccatagatattgaaaaaatgtcagaatcttttaagctcagcatatttctaaagcagctccagctcaatgaaaatgtcaagcgaagcgcagtgcacatctcgctgaattttgaccgttcagacaaggatttatcaaaagaaaaactcatgcagattgcctcttcttatatggagaaaattggattcggcgcacagccttatctggtctaccagcaccacgatgcgggacatccacacctgcatatcgcggccataaatgtgagggcagacggatccaggattaacatgcacaatattggaagaaaccagtccgaaacggctcgcaaagaattggagatttcttttaatctggttcgggcggactcgagaaaaaaacagagtcaggcgcttattaatgccattgatgcggaaaaaataaaatatggggcaatagattccaagagagccatcggcagtgtactcaatgcagttattccgcactacaaatacacaacgctgggtgagctgaacgcagtattgaacctgtataacgtgaaggctgaaaggggaaaggaaaattcaaaaatgtttcagaataaagggctaatctaccagattctggatgagaataaaaagactgtcggggttcctataaaagccagcagtttttattccaagcctaccctttcccggcttgaaattaattttgcagcctccaaaacttctcgtatgataaacatgaaaagaacacgaaatgccattgatctattgctgttaaaacaccattcaattacgctctcgcagcttgagacgcggctggcgaaccaggggattacagcagttgtcagaaagaatgaacaggggctgatatacggcatgacctacatagatcataacaccagatgcgttttcaacggaagcagtctcggacctgaatatgcagccaaagggctcctgcagcgtctgggccactcgtcccattctgaaaagcagtatacagttcctgatggtaccgctcagaaccagggctcctttatttccgcaggggaagtgcagcggataattgataatgtgctttacgctggaacgccgtcagattacgttcccaaagagcttaaaaacaagcggaaaaaaagaagaagaaaaggacagtcagataataattaacacataaaaatcaacagcatgcagacaggagaaaatgaacaggcgcttagaaaaattttagatatgactagactgatgagcatcgcagtgctgctcatccatttttattattactgcttcgattccttcaggtattggaatctcgctccggattttgcctgcaggatactggagaatattcatcgtacgggacttctggacagcttccataaatcaaagctctttgcacttggactcttggttatttcccttatgggcgccagaggaagaaaagatgaaaaactccattttagaactgctttttattatatctcaatgggcctcctgctttactttggttcctacctggcttttgtaatatttgcaaatgctgaggtctgctccgtactatatatctcactgtgttctttgggttatttaatgacgctttccgggggcaccctgctctcccgcattatccacagaaagcttagttcagcagatatttttaataaggaaaatgaaactttccctcaggaggaaaggcttattgaaaacgaatattccgttaaccttcctgcccgttatcacctcaaagacaaagtgcgcagcagctggattaacattataaatcccttccggggcattctggttccaggaacgccgggttcgggaaaatcatactttgtgatccgccatataatcacccagcatattgccaagggcttttctatgttcatctatgatttcaaattcgacgacctaaccgttatcgcctataatgcctggctgaaattccgtcatctttatgccgtggagcccaaattttacatcataaattttgatgacctctccagaacccaccgttgtaatccccttgatcctgcggcaatgacagacattaccgatgccgcggaatctgcccgcacaatccttatgggactcaaccgggagtggattaaaaaacagggcgatttctttgtggaatcccccataaatttcctgacggcagttatctggtacctgcgaaaatacaacgatggcgagttctgcaccctgccccatgtcattgaaatgatccaaaccgattacgagagccttttcacgattctgagaaccgaaaaagagatcgaagtgcttatcaatccctttgtcagtgcgttcctgaatgaggcagtcgaccagctggaggggcagatagcttccgctaaaatctcactggcgaaactctcctcccctcagctttattatgtgctgtcgggcagtgatttcacacttgatattaataatccatccgatccgaaaattgtttcaatgggaaacaatccgcaaaaaatacagacttatggtgccgtgctttcactttttgtcagccgtcttatcaaacaggtaaaccagaagggaaagctcaaaagcagtcttgtttttgacgagttccccactatctatctcaacaatatagacagtctgattgcaactgcaagaagcaacagagtgagcacctgtctggggattcaggacttcagccagcttcgcaaagactacggccgcgagcaggctgatgtgatcattaatatagtcggaaatatcatcagcggacaagtcagcggggatacggcaaaacagctctcagagcgtttcggaaaaataatgcaggaccgcgaaagcctctctataaacagcagcgacatctccatcagtcgttcccgacagctcgaatccgcagtgccgccttcgaagatttcttcgctgagttcgggggaattcgtgggcatgacagccgataacccggactgcagaattgagcttaaaacctttcactgcgatatcatcaacgaccacgaaaaaattaaaaaagaaacagctgcttacaaagagattccggtcattcggaccattgataatgttatggtccagaaaaactatctacagattaaaattgagattcaggaaataatccacagcgaaatggaaaggataattaaaaatccggtactttcatcgctggttctgaaaaaagaaaaatagcatattgtctttagatgtttttcttgagcagagcgtagaaaaatgtttttagctgccggattcttttataagctgcagtgtcttttcgtcctgctctccattgtaatatttgtcaagcacctgcctgaaacattcgggcgaatcagccagcagtccgaacagggtcatgcaggatttgagttttctttcatctggcatgcccagaatttctagtgccgttttattttcgattttaagcattgcctgggtaatttccaccagacgatttcccaatacaggatgattgagatactgctcggcttccttgaggttttcaatgccataaaagatattataatccgtaaatcccagtcctcttaactgaggaaaaataaaccacatccagtgggtctgtttgctgccctgcctgatctcgtgcagtgcgttgttatacgtttccctttgtgcctctaaaaaacggtcaagatcatattgctttaccattgcagtgcttttttgttacctgaaattacaaaatatttcaatgcctttcctaaacaggcatctgaaatatgacttctgactgctgtaaagattgataaggaaattttcaataaaaacggattaaaagagccgcgaaaatagcacccgcaggctcctgcatgcgcataacggccttgccgcccttcgggacttatagcactccggatcctttttcgggcgcttgattttgtgctttcttttttcccgttttttctttgaaaaatttcatgcgggacttgagaaaagacagaaaaaatactcacttaaaattttacatcatggaaatctcaggacgaattacaaaagatgccgtaacggcgaaagtttcaaatgacagggaggtggtaaatttctccattgccataaacgacagctacagaccaaaaggctctgaggagcttaaaaagatagtaacctacatcgactgctcctattggatgggttccaaaatggcgcagtggcttaaaaaaggcactgtggttgaactcttcgggcgtataggtctgaatgtctacaataatgccgagggcaaagcgctcggttcgctgacctttcacaccagtaatattaaaatactggtgttcccgaaaacagaaaacagtgctgaagttcccgcagttcaaaataaaaatacggatcaagacacccctgacgacctgcctttctaattggaatctataccgtttcacatcaaaatttatacgccatgaaagcctttgaaaaatcagtttacatagaatatcccgtatccgcccagttcaaaaaaatagtcctctctaatatggaatcttatggcgggacaaaaaaagagcaattaaaatctttcttggaagacctgcagaaaaacggatgcgtctgcgggatgatttcagagtttgtctacaactcggactgcaggaaattctatatccagcatttggatgatttggaaaatatccgatatgaaattgaagattcccttggggaatttgtcaaaaaccgccaccgcctgccccattacacctttgtatgctggctctgctttgaagaatactgttttgacatctacagaaacagttttgaataaccctttttcaatcttaaaatcttcctttatgaaagcatcagataaattcaaaaacgccgtagaaagctacctgagcgaaaaagcgcagaacgatgccgttttttcagtggaatataaaaaagaaaacaaaaacctcgaaagctgttttcactacatctttggcgaggtcaaaaaaacaggggaatgcgcctttgacaatcaggaaatctttgacatggctgtgaagtactacacagacgacacgattggaacgcctgcccctgcacaatgcagagttgcagtaagcccgcctgtaaagcctgatttattctcggatgcgcccgcagtatctcaaagcacagttcaaaaaatagaaatagtgcaacccgtgaagcctgtgcaaaccctaacactctttgacttatgatacccaaaacagttatagaaaaagaaatcagcgccttaagcaccaccctagccccaatcacatctcagatgcaccgatgggcggaaaaaaatattttcctgaaatgggcggtgctctcaaggggaaaattccattgtctggaatgcacccattcgtggaagcctgacagccaaagccagtcctgcaaaaattacattaactgcaccgcctgtcaggggaaacttaaaatgcatcaggacaatcaggtgtatttcagggaaatcgaatatttcgccctcaccgatacctgctctgggtatcaggtggtgcgtatcatctgctcgcacaagaacatgaaaaaaaatgttcttcccgcctattcccataccgaagtcatgcaacattggataaatccaaaaggggaagtacgcaccatctcaagaagcaccaatgttttttccaatgcctatgatgcatggcagtactattcccctttggaaatccgtccaaaggattttcagtactcgccaaaataccgcatcaatccctataaggtttatccgcacatgaaagtgattccgcatttgaaaagaaacggttttaaaacttccgtacacggcattgcaccgcagatacttttcactgctcttttaaaagaccccatagcagaaacccttttaaaaagttcgcagacctctctgctcaagcattacctcacctcccatgaacagcatctgcgtgaaaactggcaggcagtaaaaacctgccttaaacagcgttatcagattcaggacataaaaatttgggaggattatattgccctgctccgatggtttaaaaaagacctaagctcccctgcgcttgtctgccctgaaaatttagaccaggcgcatgacaggcttgttgccaaaaaaagggacatacagcgcagaaagcatcttgcgcagatgcgtgctgaaatacagaaagcagagccgatttacaaaaagaataaaaaacaattcttcggactttcttttaccgataatgaccttacgataaaagtccttgacagtgtgcaggattttctccaagagggcgacacgctccaccactgcgtatttaccaacgagtattataaaaagaaagattccctgatactgtcagcgcagattgaaaacagacctgtggaaaccattgaaatctccctttcgagaatggaaattatccaatgcagggggcatagaaataaaacctccaaacaccacaatcggattatgaggattattaataaaaacctgtctgagattgccgggtggttgaaaaagcacaaaaagcagactgcttccgcttaacccattttactattgataccgcagattttacactgcggtattttttttgcgcgcagacactttaaggtgcacggggcagtcccgacttaggggctattatggaatgttaagtcaatttcaccacaaagttcgggcacgtccttcggttctccgcaaaaaattcccccataaatgcagggctgcgctcctgctttattgcgttgctttctgcgttcgctcgtccctgcccgctcagcggtgctgtaattaatcttaaaactacagcaattatgaaaaatcaacatcaaaacacagactggcagaaagtatcagaaatcgaactgatctataaaaccagagtaaaaagcactgaaagaccgtgtatcacttcttccagagatgcttaccgaatactgctcgacagctgggatcccggaaaaatagaattctttgagcagttcaaagtgctgctgctcagccagtccaacagggttctgggaatctacgaagtttcctcaggaggcatctcaggaactgtggtggatatgcgcctgcttttcgcggcagccctgaaagctgccgccgtcgggatcatcatcacccacaaccatccatcaggaaaaacagtcccttccgaggccgacagaaatatgacccgaaaaatagagaagcgggaaaactgctggatattccgctgctcgaccacctgatcgtaacacccgatacctattactcttttgcagatgaaggcgccctttaagggtattttcatctttcatgcccttgcgctgttctgttttttttaagtaattttgcctatgaatcatgaagaaataaaacgatattttgagaacaatccgcagccgaaggaaaaggacttatacttatacctccgcccctgaaacatctcatatcaaaagtttaatattgataaactatcagtaatccaaggaatatcgaatgtccagcgttcccttgttctagaagaagttaaaaatgatttcgcctttaatttataatctattttaacaagactgctaataaacttttacacccttttaagtaacagtaacctgtaaagaacaaaaaaataatcagatttaacttccagttaatgtaattatgagttgttatcaaccttattttgtactatgcgttcatatattttacggacatctttaggcagcttccctccataccaattatcaccatttggctgttttgttgatttaattaatattttaatgcactctgtaacgatataccatgccatgtctttatcattgaaatctgaaacaggtttagcagtataaggcagggcagtgtagttccccaaattataatccttggttatccaactgcagtaactcaaaattataggaactattttaaaatcttcatctttctttccgcgatcaattgcatttttaatttcgtaattaaatacataatcagttctcattaaatttggactgatcataaaacaaattatatcagattcatcaaaattctgctgaatatccttatcccattcacctcctgcaatcaattcggtgcagtaccaggttgaaattaagccatctctttttagaggttctaaatgatctaaaagctggttgaccataaccaagtcatctttagaatagtcacaattgagttcagttacttttaataacgaatcaatttttagatcagatatcatttttttaaaattctcatctttaaaatggatatcagatattttctttgcatttcctctttctgtaacaccttgaaaccaacctattaacttattcatatcttttttctgaatctataatttattgcttttgtagttaaaattgatactaaatcataaatattccatcaacaaatcaacaacaatcgatactctccatcgttttctatgggtgctctgtgaatacatggcagtacttgttgtttgggatggtctacagccagacgccaaagatgacccaagcctaaattaactggtgctgcattgggatgtaactgataatgcaaatcgaaataattttcttctagaaaactttcgaattcttccggtggtccatcgtgcagctcttgtaattttgcacggattttcggaattaggattttttgttctgcctgcgaattagaaacaatatcacttgctgctccgtggtaggtacataaaaaagtatcggttgcaatgggcgaacgatctacatgaaacgaatacacatctgtcgagatgaaatcaaattcgtcatcacgttcgtaacactttagtaaattaagtgagggcgaagctccaaaatcagttaatagttgtaaatcgtttaagataacttctctggctatactccccttttcggtgagttggagtgcgattagatcttcgggataaactactgtgatattttcttctaaggataatttagctacaatttcgttaaaatcaccgtccaaatttctgtaccagcacagtgcgttcctttctcccttgaaatgggtctgtaccaattcagagaaagtagctactactccaatttgattgttgttcgaaaatatgttgttcatcgtgttgtatttggaagctgcttagaaagtttaaaactaaacacatagaaacatagttttcttaccgtggtaaggcatttcatttgtataaataaacatagtaaatcctatgctttttaactaagcgaaacgtctttcgaaaaatcagaatctatgtttctatgtgtttaaaaataattatacgtaatggatcataacagaataatctgctaaaagttacttacttttttgttttataaactttgtaaaaaataaaaagaatacccagccaaatcggaattaattctacggacaatttcatatcggtcatccacatgatggataaaattcccaataaaaataccagacagatgtaattacttaccggataaaatatagatggaaacatcgttttagtactttcctgctctttcgtacgtctgaatcttaaatgtgtatacgaaatcattccccagttgataattaaagaagacaccactaaagacattaaaatgctaaaagcttgttcgggaattactttattgattaaaatacagatcgctgcaaaacaggaagaaattaaaatcgcattaataggcaccgatttattatttaacttctttaaaaattgaggcgcattaccctgatctgctaaaccgtataacatgcgtgagttactgtatacactactattatataccgataaagctgcggttaaaacaattagattaagcacattggcaatcagacgggtaaagtatattttggtgccaaacaactcaaactccattccgtttagattttgaaaaaccattacaaacggactactgtctgtcgttatttgtcgccacggagacaaagcaaataaaataaccaatgcacctacataaaaaataaggattctatagattacctgattggtagcttttggaatgtttttctcgggattctctgcctcagcagcggtaattccaattaactctaaaccaccaaaagaaaacataatcagcgccattgcagataacaagccctgaaaactacccgatgctgttttttcaaagaaaccttttggaaaaaaacctccgtcgttgtataaattatgtatggtagcctgctcccctcctgtaccgcttatcagcaggtaagtaccaaaaaggatcatggcaataatggcaaccacttttatgattgaaaaccaaaattcggtttctccgtacactttaaccgaagcgaaatttaaagcatttataaccaggaagaaaaacaaactggatgcccatagcggaatttcgggccaccaaaactgtacataaaccccgatggcagtaagttcggccatactcaccaaaatgtataaaatccaataattccaaccagatgcaaaacccgcaaaagaaccacaatatttataagcaaagtgactaaagcttcctgagacaggctcttcgacaaccatttcacccaattgtctcataataaaaaaagcaataataccggcaactgcatatcctaaaataacagatggtcctgctaatacagccgccgggccaataccgagaaaaagaccggttcctattgatcctcctaaagcaattaattgaatgtgacggttggtcagcccacgtttaagctgattctcttctacgacttcctgattatttttcacaaattatatttttaaatgagttgacagcgaagataagttaaaaaaggaatcgtacaaaacatgcactgcgctaaaactaagattaggttgctcattttttaggagttttccaattttacatcttaatttttgtgttaaaataatctatttcccggttatattttgcagtacctcacgtatcgtttttaaggttgtggtagaagtttcccgaatgataattttattcttcttttctttaataagttttgtgaataaattgtcttcggtattaatatcaacgatagttcctccgtacttcaaagtagtttcggcaatagccattggcaaatttgttgctccggatgttccaacaataaagagaataccagaattcttggcgatttttaaggaactaaattttttgtttgttttttcgtcgtagtactcatcaaaccacaaaatattgggtctcatccagctgccgcattttttgcatttaagcaattctatgtcttcttttgtcaaatcctcatctatctcttttcctttgacttctataggtaatttttctatttctttacagccgttcgagcatttgatttctctggtttttccatgtatttcatagattctttctgtaccggcacgtctgtgcaggttgtctatattttgtgtgatcaaatgaaatctgtcttgtaaaagactttcaatttttactatttcatgatggctctcattggtctgagcattttcaaacatcttttttctaaacagtgcatactgccaaacctcttcaggattttccctgaagtatttaaaagttccaaactcttccggtttatgaaattgagttccttttacccatatcccgtctgctcctctgtaagttggtattccactttcggcagaaattcctgcacctgttaaaaatgtaaatccatttctattgcttttatcataaacctgacttatgatttcagtaagttgttctttcattttttaattctttcaatacttaattttatagtaaacttactttcagtccattattaattcacttatcgcaatctgtttttaagtaaagctagcgaattctaaacgctttagagaaaacttaaaataatagtttttaaataccccaaatctgttagaaaaaaaattaacttataaattaaaatgacaaaataaattttatcttgccaataaactaaaacttaaaattaattgaataccattaaaagcaaactgactttaattcttttgtcttttgtcgttttttattcttgtaaaaaagaggataagagttctgataacaatagtaaccaaaagaatctacaatccaatactaaggacgatgttattaaaggaggaaacactacaactttattttcctttaatactgccaaggataacgaaatagtaaaaatttccggaagtgaagttagtgatgatgatatttttttacttgctggagctaaaaacatactgctagtttcaaagtataaaaaaaataaaccacaacaattaattcaaagtgacaccttattaataagtgattatagtcacgttactatagacagacaactctttttaagaaaaaaagtaaaaaatgcagattattttctatttgctttaatggagtctcctttaggtaatggagatcatggcttgtatttgagttttataatgttgaacttaaatactcttaaatattataccttaaaatatgaaggagaacctactctaagatctgataatgcggttgatggggaatttttagaaaatagtgaattagatcgtgatatagtaatcaaaaatgagctatatcgtttcgcaaataagagtaaatggatttatagtccatcagaagaagaaaaggatattaacttttataagaattttgaacaaaaatggtacgaagacaattatactgaagatggaaaatcatcttatccggctgttgtgaaaagtacttattattcggaggatttatttcaatttaacggaagaggaaatgacgatggagccattgaaaatgcagcttttaaaattgttccttactttcgtcataacctcattggatatgataagaataaaagattatacttcccaattaaggtcgaatcatgcgctcacggatgtgctaaaactatagaatttctgtctgaacatgaaatagaagtaacctacgaaatgaatgtagaacagcctgatactatagatctgaataaaataatatttaccaataggccttagctttttttgaagaagttacaaacctatcctaaatctccatttcattccccattaacggaacggtacatttaaagtggtactgcttctggattttaacacgtagttcatcggcaggcaaattttcaccgtgcaccagaaagacgcattttggagtgttttcgagagcagacagccagtttaaaaggtctttttgatctccgtgtgcggagagcccttcgatctgaaagatttttgctcttacggaataatagtttccatatattttgatttctttggcaccctcaagcaattttcttccccgggtaccttctgcctgataccccacaaaaatcactgtggttttttcgagacttatgtaatgttcaaaatacgacaatactcttcctcctgttgccataccactagccgcgagaaccactttaggctgaggattttctataatccgcatggtttcttcgtactttgaaactatcgtgaacattttagacatttcgtggcaatcctcgacggatagtttatgccattgcagattttctagaaatacatgcagcgcatttgcccccatcggagtatcaagaatatagggaacgtcgggaattctgccttcttttttgagcttccacaataaaaacattaccgattgtacccgctctacagcaaaaccaggtatgattaccgtctcttttttggctatggctgtattgataagtatttccagttctttctttacatccaactctgcatgcagtttgtttccgtaggtactttccagaaaaacataatcggcctttacgggtttggttggcggaaacatcaatacatcatcatcacgtccaatatcacccgaaaatactaacgttttaccttcggcatttacagtaatactgcacgctccgataatatgtcctgcattttgaaaaccggcagtgatatcctctgcaatctctactgttgtatttggtgttattattttaaaaaatggagtaacagcttctgcctgctctacggtataaagcggttccgcctgttcgtgcttagaatattcttctttgttggctctttcggcttcttcttcctgaattttggcactgtctaaaagcactagtctggctatcgctttggttggagctgtacagtatattttgcctttaaaaccctgtgctactaatcggggcagccagccgcaatgatccagatgaccatgtgtaagaagcacaaaatctattgtggaaggtaaaacaggtaacggatcccagttgagttctctcaatgcttttataccctgaaaaagtccgcaatcaattaatatcctgctgttttgagtttcgatgagtgtttttgaacctgtaaccgttcctgcacctcctataaattttactttcatcttagataagtttacaaatttgtgaagcttcgtgtactatattcttgattcggtttggactcagtccaattttttttagtccttcctgatcgtcaagaagatcttttaccagtatctgatccaggaaaagtaatttttctttttcgaccattgatagtgttgtcagacaggtaataggataaagcgctcccctatcaattttgtttttgagatttttatctggcggatagtcccaacttaaaagagagattccactacagttggcaaaatcctgcgcgtctttggtaaaacgattgttggttactatgatacaggatgtgaaagtttcattattagaaaaaataatatgccgtttttctcttaaatcattaaaccgggaaagaatatacatgggtacttttacatctgaagccccatctttgcttccgtgaaacttgcattctatcatcgttatcgcatcgtctttcataatagcaacgtctacttcatgcgagacgcatttaccctgaagcgttagatttatcttggctttaaacccttctgcggcatataatcttgctatgaatttctcaaaatagaaacccgcaggaccgagcatctgcaaagcctgtctgatattgtaacgggcggcatatccgtttgcagttttttttaaaattgcaaatgccatcttgtagatttctttggtagtaataccatcatacatctgcttttcgatctgaaccatagattctgttataacatcaggagctgcgcctgattttttaagagaaagcttcagtttttctttgtcgaaaggaactttgtgtcccgagtgcttcgtgattttcatggcagataatgagttttaggaactgtttttatttgactacaaaagaacagtaagcaattataattcaattctaacttcttgtattcgcttctactgccagtttccggggctggaaacctctattttgggctttctttcttcttaattcttacgaaatacagctcttgaaggtttggtctttttaaactaaacaacccttattactcacgttttttctgtttataaaactcctataaacagttgatttactaaacgatataaaaagttgctataataacaaatttcgggaaatatttttgataaacggcattttcgctctaatttttaaataatgggcaatcgttataaaaatatattttattaataattatttttattcagtctaaattaagttatatttgcaacgattaaccgcctttttgttatatagcttattcagctgccagatatttaatacaatgacttcttttaatagccttattgcattcctgctaaaaaggattgcatcagttctgcttttattattctctcttttttttaaccttagtttttctcaaaatactgctaaaattacgcttcagattaccgtttacgatgctgaaagtaaaattcctttaaaaggtgtattgctttctgcagaaggaattagcaaatatgaagcgcattcagacgatttgggcggcataattttaaactccattcaaagtgaccgttacacgcttaaactttcacatttaggctacgaaacgatcgagaaaaatctcgagtttaaaacggggcaaagtctttctttcggattaattccgtcaagtgtacagctaaacgaagtggtcataacggccgtagaatctcgaggtatgaccagtacctctgttatcgataaaaaagccatgcagcatttacagccttcaagtttcaccgatttactggagttacttcctggcggacgctcaaaagatcctgtatttaatgcttcgaatcatattaaattaagagaggttggaacggcagattctaattatgatatttcttcacttggaacttcttttgtaattgacgggatcccaataaatactgatgcaaatcttcaatataccaccggacccaatatgtctatcacgccaggttcaggatatgccaatacacgccgcaatacaacttctaaaggagtagatatgcgctcaatttcgacagatcagattgagagagtcgaaattgtgagggggattccttccgtagaatatggtgatttgacgagcggacttattaaaattcagcgaaaaagggggcgtactaattgggaatcccgttttaaggctgatgagtttagcaaattgtattatttaggaaaaggttttgaatctgaagaaaaaagattgattctgaatgtgggaattgattacttaaatgcaaaatcagatccgcgtaacagttttgaaaactacaaaagaatcacgtcctctctacgtgcacaaaaaatttgggaaaatgattcgcatcagcttcaatgggattcgagtttagattatagcggttctatagacaatgaaagagcagatccggatgtgggttataccaaaattgaccgatatgcttcaagctataatcggtttgcatgggcaaactcttttgatttaaagtttaaaatgacatcgtttttaaaagcaattcattcgtcggcagcaataaatcagcaattcgataaaattgagcaaaccaaatgggttcaggtctcaagtgcaacagctattcctaatactaccgaacaaggtgaatctgacggaatttttctaacaccacagtacatttctaatcttactgttgacggaaggccctttgatgccttttttaaaacaatgggagatttcgaaattcatttgtttggaataacacacgctctaaaagcgggttcggaatggacttattcaaaaaataacggaaaaggacaggtttacgatactacccatcccccatctcctgaaatgtctacacgtcccagatcgtataaagacattccggcgagtactgatctttctttttttgtcgaagatgtcctgtccattccaattggtaaataccaattaaatcttgcaggtggtctacgggcgatgtcgttgttgaaagtgccgtcggcttatagcatttcgggaaaatactattttgatccccgaattaatacgcaatgggtgttcccatcttttaaaatggggaaacatttcctgaaaacagaacttacggccggtttcggacagtacaccaaattcccaacactggctcagctttacccggattttatctataatgatctggtacaattgaactattatcataatacaccggagtaccgaagaattaatttaatgacttataaaacatctgctgtaaattacaatctaacaccggctataaataaaaaatgggaggttcgagcggatttctcttatgacaataatcgtttttcggttacttttttcaatgaacgtatggattccggatttagaaacaattctcaatatcaggcactgtcatataaaaagtatgaccataattctattgatcctttaaccttaacctcacagccaaatttagccgatatgcgttttgttagagatacactattaacctcatacaacaccactaataatggaagtaagctgcttaaaagcggggttgaatttcaattttcttcaaaacgttttacgtcaattaatacccgatttactctaaatggagcctggtttaaaaccacttataccaatagcagtccggtttataaaagaggacagaaagatattattattgatgggaagaggcttccttatttaggactgtatcagtttgatgatggttctgaaaaacagcagttcaataccaatttgattgtagatacctacgttgctcctcttggcttagagttctcgggatcgtttcagtttttatggtttagaagtgatcagtcgcttcctatgaacggaacaccggttgcttatattgatccttctggaaaacagcatccttatctcgaaaaagaccaatcagatcctattctgcaatggcttgatatcaaatacaatgatgctctttttcaaaaaaaatcaatcccaatgtccatgaatatgaatctgaaagtatctaaagatttttacaagagatttagaatttccatgttcgttaaccgactcttcagttactatcaaaactatgaaattaatggtcagaagatcgaacgacgcggtcttacttcaccatatttcgggatggaattaaacttgaatttttaacttttaatattaaataaatacccaattatgaaaatcagattactacccatttatctcacaatagccataatggcactattaccatcctgttctaaagatgatgataaccgcaataaagagaccgctttaaccttaacacttgtaaatccggaagatctaagcagtgttaccttttctgatgtttccgtttcttttaaagagcgtaataccggtaaagtgattcaaagtaaagctttaaataataatctctctgtctctttaaatgaaggttcttacgaaatatctattgatggaaaaatcaactatacaatagacggtaacattaccgaagcttcggtaagcagctataaagaagccgtagtgattactggcggaagtgccgctgtttctttaaatcttttcctcaaaacaacacaatctgattttgtaattgaagaggtcttttttaccggaaccaaaacaccacagggaaaacaatatttaggtgacaaatactttaaaattcataataatacggataaagtattgtatgctgatggcttaatgatcgcgcaatcggaattcatgaccactgacaaacaagactatagcccgaatatcatggcgcagtcgtttgcggtatctgctgttgcaattgttcccggtaacggaactacttatccaatcgctccggctgagttttttgttattgccgaagatgctatcgaccataaagaatacaattcagcttcgttggatttaagaaaagctacttttgaattctatacagaagacgctgatgatgttgataatccttctgttccaaatatggagaatttattctcttctatggtaattcataacagaggttttaaaagttttgttatcgctcgtatgcctgtaaacaaaacaaaatatctaacagattatacctataactacgaatacaatctggtatttggcggagaaagttatccaatgggcgaaaacgtgtattcgattccaaattcatggattgtagacgctgttaatttaagtgttgaatctgaatttaaatggattgttactgctccatcgctggataaagggtggacttattgcggaaaagtagattcagatgcaacgcgttatggaaaaagtgttcgtcgtaaaacgctttctactacttcaaacggcaaaaaaatactaaaagacactaataattcgacattagatttttcccctgaggttaaaccttctttgctgaattaatgaatttaatcatgagctttcgttccctatttctatttatcattttgagttgcggtttgctgcaggcacaggacagtacttctgtgctccttcgcattcacgaagacttgtctcccgagaatacttttgcccgaagattttataccaatcctgcaaatcagcattatgcccgccgttactctttatcagaattgagcgcgggttatagctcggcagcacagcaaaccaatatccaacagttgggaaatggaattcgtcaatttcttattaaggcacaatcgtattataagattaactctgaaaatactgtttttggaaacgctcattacaagaatggtaaacgcaaaaatgtgcgttggaacgaaagttcagattatcaaacaatttatccttatgtaacggcagattctataggaggtgatctttcgtatgaagagtactcctttagtggcggttatgctaaagtttttaataaaataactttgggtattagtgctgattacagggcgctaatgcaatatcgggatattgatccaagacctaaaaatacggtttcagatcttaatgtttctaccggtatttccttaaatcttagtgatcattatgtattaggttcggctttaaatctgcaaaaatatacacaatcgaataatctaaaattctttagcgaattaggagctcccgcagtttatcatatggcaggacttggcgtttacaataaattacttaccggaagtaaactgagttcgtattatgacggaagaggctatggcgccaatgtacagttttttccaaaagaccgaaatggctttggtttactactgggataccatcaatttggttatgaaaaaatcatgaccgaattccaaaaccttgtcgcgtctacaattttagagaatcagtatgaaggagaggtttcttatttcaaaaaatcaaaagaaaagttttggggtgcaaaaattggacttttttacacagaccgaaccggaaaagaaaatatatttgacaaccaaagtactacatcttacatcaaaatagccgagcataccaaatacaccaatcaggttacgtctgttgtgttttcaggattgtactacgttccaaatcctgaattatcatggtcgattgtaccaagctttaacttaaaaaatactgcggaaaaatatattgatcctcttcggactattgacctacagcaaggtatcggccgattggattttgccatttcaaaacttttatctccgtccttaattaatgtttcggcttcactcgaacataactggattttaagttcagaaatggagttaaacgatcgcaaagccaatttaatttttaatatgctgaattataactttgcttttctgtcctctccatacactaaaataaatctcgctgcaagatgggattacaagtaccaaccggaccttaacttttttgctaaaacaagtctggattactaccgttttcctcaaaaacaaaacaacactttttttcaaatgtcaataggtttgacattttaatttagattataacattactatccgcttataatgaagtctcttttattaaaaacctctttttctattcttttcataggtctaatttatgtattgttaagtttcagtgctgcatttagtgagaaacttgcaagttcaaattggcgtgaaatctatagtaaacccaccaatcaatggccaaaacctactattgatgacggtgtgcaatggcaggaattcgaatctcttgcgatcgatacgagttactacgataccatggaaaatcctaaagtaattttaggacagctgctttttttcgatcccaaactttcggggtctagtcaggtatcctgcagcagttgccacgatccggaactggcttggggagatgcgcgtgaagtatctttagggaatgatcatttgcaaggaaaaagaaatacaccttcgttatacaacatcggagcccgaaaatcattcttttgggacggacgggctgccactttagaagagcaagctcaagggcccattacagcgcatcatgaaatgaatatggaacctaaaaatctggctaaaaaattgaaaaaaattaaaggttatcctgttttatttcaaaatgcttatggaagttctgagattacttatgaaaaaatcctgcagtcactggccgtatttcaaaaaacaattttaagtaaaagaagccgttttgatgcctttatggatggtgattatatgcaattatcagatcaggaaatctacggtctgcaccttttccgaaccaaagcaagatgtatgaattgtcactccggaaaatacctgaccgatgagtcattccataatattggacttacttattacaaaagggaatatgaagatttaggactttatacggttactaaaaaagcggaagatgttggaaaattccgaactccttctcttcgtgatgtactttatacaggcccctggatgcacaatggtttatttgataatatcaccggaattgtgaatatgtataacagcggcatgcacatgattgatcctgatgaaacagaaaaaatagctgatcctctatttcctaagacagatgttttaatgcagccgttaaatcttactgatgacgaaattgtggctttggtttcttttattaaaacgttatccggaagacagtataagatggaaagaccgcaaataccaagataactttggtctttaaatgaataatacttcagagaaaattttctctgaagtattatctgttataattgattacgggctggtttaagccgtttgctttctcctttttaaattaaggtttactttgcgtcaaaccatagttttgtagtcagcaaatcttttccctgagccgatacagctgtctgatagctggctccattcagtgactgttctgttcccggataaaagaaacgtgaaggaatctgtccgtttaaaacggtagccggacctgctttcaataccggatagtccaatcttctccattctgcaaaagcatcaagaccctgcccgaaaaatgcgatccatttttgtgtaccaatcgatttagcataattcgctgcatcgtactttaccgctgcctgattaagataatttgaaattgtagcggcatcagtaattccaaactgattgaacgatgctgtaatcgcatttttatacaactgttctgcatctccggcaatataaccgcgagccaccgcctctgaaagattaaataatacttctgaataagaaacaattacggctggtgatgacgaggttaaaaaataagctcccggctttgatgttttagcaaatccctgactgttggcatcactgttggataatccgttagcacctcccacatattttccaacgctagcatctgttggcaactgagcataaaccggcaaacgcggatcggagaattcatttaacttatccaccaatgttttcgaaatacgaaagtcatcacgggtttcaaaccaggccgaagcaggattttgctgaggcgaactcgtataagtaaacttaaaagtttcattgttattgctaattactccggcagcatccgtcgttgcatcgatcgcggcttgtttggctaacgcaggttctttatcagaaattctcaatgcaatacgcaaacgaagggagtttactaattttttccatttcgagatatcgcctttataagccaaatctcccgttacgcttccactggttggatttagtaaagactgcgcttgttttaaatcttccaataaaccggtgtacacctctttttgcgtattgtatgccggagttacttttaagcctgcttctttataaggaatgctcccgtaagcatctgtaagcaataaaaatgcccatgaacgcaaggttaacgcaattcctttgtaatttggatttgcctgctgatccggaaatttcagaatcgtgtttaaatctgtaatcaaagtggcgtatcccgtattccacaatgaagtgaaagaagtgttcgatacgtcatatcggtccggttctgtatactgaactttagcccaatgctgtacaaatagtaacgacgcattaaaattattgtcggctccccagtacaaatcggctccctgctttaacgtacctgtcaatagataaggcgctaagggtgtttcggttgcatttggatttttattaatatcatccaaagtgtcactacaagaggtaagtgctaccgcaaatagtgttatataagctattttttttagcatgatttcgcgtttttaaaatttaagattaacattcagactgaagtttctcgtagttggtaaagacaagctctccaatccctgtgcatttccggtattgaaagcggtttcaggatcaatgtttggggcgtctttgtaaataaacaaaaggtttcggcctacggcagtaatacttgctccttccagtcccagtcttctggcaaatttcttattgaaattataccccagttttatttctctcagttttacaaaagtcgaactgtaaatataggcttcgctaatattgtaagatgctttatgaaactcctgcgcactaatcacctgagtatttggggttccgtctgcataaactccgttaaagagaactccgtcatcatacaccgttactccatttggtgctccagcactcgttaccaatgtttttggattggctgtactgttgcccgggtagtagtaatttaaccctccgtttgctgcatcacgaccagccagcgtctcagccagtactccggtataagtacctgttctgttggtacccgaaaaaatatctccgcctacactggcatcaataaggaatgaaaattcaagatttttataactcaaagtgttggttacacctgctaaaaagtccggagtataatgtcccaatactcgtttttgaggatccgctttcggcaatccgttagctccaactactatatttccgtttgcatcgcgctgatacgctgtaccataaagtgctccataagcctgtcctaccgacgccagtacatcaacacctcctgatgaaccaatcgtatagttttggatttgtttgtcgtaatctaaaatctttacttcactgatgttttttgaatagttaactcctacattccatttaaaattctcggtttgaatcggagttccgtctaactgaacttcgataccacgattgtttattttacccgcgttgattaattgcgaattataaccacttgaagccgtagtttttatttctaaaatctggtcaaaactgttggtattgtagtaagctacatctaagtgcagtctgtttttccagaacgaagattctatacccaattccgtagaacgagtggtttccggtttcaggttctcattcagttttttcttcgctgaagtttgaatagggtttccgtcaaatgcggtttgaaaatcgtaaaccgtagacaattgatacggatctgcatcgtttcctacttcagaccagcctccgcgaagttttaagaaatcaagtgtgttgcttttcaaattgaaagcatcagaaactacaaaactaccattgaaggaaggataaaagtaagaacggttgctgcttggtaaggttgacgaccagtcattacgcgcagttacgtttaaataagcatagtttttatatccaaactgtgctgaagcataggcactgtatactcttaatcttgacagtgaattcgatgaagtcaacggatctcttgaattcgttaaggtatataaatccggtacggctaaacgtggtgctttttgatagttattggcatcactgtggttacgaatattgaatccggcaagagcatccacactaaagtcttcggttagttttttcgtatatgtaaaaattccttctgtatttctttcgtttaccgtgtaagcatcttctgcataggatccgaatggagttccgtttgtaccatatttaatggtgtattttctgcgatcgttataataatcaactccggtacggaatttaaaattaagtccgtcgataattttcgcatccaaatgaatatctcctattatacggttacgctgttggctggtggtgttgtaataggcgttccaatagggattgctgtaatagctgttattccagttcacctctctgttgttctgaagctgatcgatatctacctggcgtccgaaccaaaggaactgtagcatcacaccggcggcacggttaccttgcggaccacccggaagtgcgggtgcatcagtcacaatatagttagccgttacccctacttttatgtttttagaaatttggtaatttgtattaaccgtaaagtttgttttatttacttcactgttaggtactgtacccaattgtttttgattgtttattcctaaacgaaaatctgatttttcatccgatttagctatagatacgctattatcgtaggtaacaccagtgttaaaaaagtcttttacattatgaggatgtgccacaaaaggtaccgcaacaccattagaatagaactgaggaataagacgaccgtctaattttggtccccagctttcatccactccatcattgattccgccacctttaccgtctacgtaactgaactttccgtttgatccttgtccgtatgaattttgaaatttaggcaaagtagccacctgagaaattgtgattcccgagttaacgcttatccccaaccctttttggctttttccggattttgttgtgataagcactactccatgtgcagcacgtgatccgtaaagagcggcagcattaggaccttttaagacacttagggattcaatatcctgtggatttaaatcggcaatagcatttttaaaatcacgagtggtaccgcccgtacttcctagttgtgagttgtctacaggaactccatcgaccacaaaaagcggctgattatttccggaaatagacgtttccccacgaatgatgatacgcgaagatcccatatcaccttgcgaattggtaatacgaacaccggcaagcttaccactaaggctgtttagaaaattggtttcttttgtgtctgacaattccttgcccttaacggcctgcgtggtatatcccagagatttcttttcttttgtaataccaagtgccgtaaccactacttctgacagtgcattctgttcctgagtaagcgtaaccacaactgaattttcattggctgtaacttccgcttttttgtaacccaaataacttacaattaacgtataaggaagtttttgcccggtttgaaagtaaaatttaccgtccatatccgttacaaccccgtgagtagttcctttaatgtttattgaagctccaataacgggctcttttgtaacagcatcgattacagttccttcgagtttcgactggattaagggtttaatttcctgtgctttaatacctatggaaattaacaaaatacataatcctatatatctgtttaatttttttttcattactttgttttagtttaatacataaggtgccctgaagtcggatttattccgctcgtgctttccttatagagatgtacaatttctttaagcttcgccatttctgttcccgcagaaatggttctttttttaacagctatgcattcgtttcttcattttttattattttggattactatttttttaatgtatttgtgtaagatttcaatctcaaaaaaaaggacttcatcttagtggaattataacgttcgattaaaaattactttactgtccggctacttttaaagagaacttatctcctattaattctcactggttaaaaaacagtcgtgaatattctattttttagtctaataagacaggtatttctgtacgtattttaaaagcattcatttggaaataaattacaaaaaacacacccatatttcttttgatttatggctgacattaataaagtccaatccggagtttaagaagaagagaaatttattgtttaaaaatttctttgaagttgattgtacgatcgataaagtaaatgaagtagtgaggtactatgatgttttgtgcaataatattaacgaaaaaactggattgaatattgatacgtatgaaatttattatctaattttaagcgcactcgaagttgatattaataaattcgaaacaaataagttaagtcagttttatgaagaaacagattctttgtttatgaactataagccggagttaatttttccggatacgaagaaattttttcaggaaataaccaatgaagataagactattaatatactgagtaatacagcttttatcaaaggcagaaccttaagaaaactgttagcgtattatgaattgacagatttttttaaatttcagatttattctgacgaagttggattttcgaaaccaaacaatgaaatttttcaattggtttttgatgagattaatgtctttaagagtacggtaaaaaaacaaatattacacgtcggagataatagtgttgcagattacaatggagcaattaatttcggatttgatgcccatttattaaaaatataaaagtgaataaaagttacagcttacataagatattggacaaagataattgtccgtttaaggaacaagaatacagtaaatttaaatttggtgacaaatcatttgcagagaagtttgcaaaggaattgtttgaaggtttcgtgtcagaatttggagaattgttgttgtcggaacaagaaattgttattctgccaagtccattcttatccataccaacagcctcgaattttttgtgttcttattttaaaaaagagctgaatagttttttattcaaaaatggtaaaaagaccagtatagaatctaaaatttacagaaaccaaacctatgttacggactatggaaatttggattttgatgaaagggtgaaattaatttcgaacgatacctactatattgatcgtaattttatagacggaaagctttgtatttttgttgatgacattaaaattaccggtagtcatgaacatactgtgaataagattctaaatcagtataatgtgaatggagattttgtttttgtgtatttcgcagaattatcaaataaggacattcatccaaaaattgagaatcactttaactactacgctgttaaaaatgtcgaggatatcgtggatataataaacagcccttcttttcaatacaataccagaattgtcaaatttattttaagtttaaatgaagagcagtttggctatttagtagaaaatatttccagtgaaaaaacaaaagacttatttcatttagcaataagtaataattaccatcagattttagagtataaatcaaacattaatgtaataaaaatagattaaaactatggctatcaatttacagaaaggacaacgtgaaaacataaatgcacccaaatttaccattggtttaggatgggatacaaacagcagtagtactggatcgggttttgatcttgatgcatcagtttttattttaggcgataacagaaagataatatcagattctcattttgttttttataacaatctgaaatcaccggatgaggcggtaatacatacaggtgataatttaacaggagatggagacggagatgatgagcaagtaaaaattgatttgactaaaattaattcgacagtaaaagaaatttgtgttgttgtaaccattcatgatgctgagaacagaaaacaaaattttggtcaggttagaaattctttcattcgagttgtagacgagagtaataatagcgagatgcttaaatacgaattggaagaggatttttcaatagaaacagctgtagagtttggaaggatttataacaaagacggccaatggaaatttgaagctattggtgttggaatgaaaggcggattagaagattatttaaacaaatacaattaatagatatggcaattaatttagaaaaagggcaacgtatcaaccttgagaaaagtaatggtactaaattacagaacatctgtgtcggtgtaaactggggagcaattgagaaaaagggattttttggcaccaaaaaagaggcagtagatttagatgcaagctgcgctatttatgacgacaagaaaaatcatattgattctgtaaattttagaaaactaatatcaaatgatcgtgcaattaagcatagtggtgacgatttaacaggtgatttaaatggggatgacggtttggataatgaggtaattactctggatttttcgcaaatatcaccagctgccaatcacgttgcattttttataaatagctttagaggacaggattttaaagatatcccttttgcatctatcagaatttatgaaggaactccaacaaaagtaagccaggaatttgcacgttatgatgttgcaaatgatgcttccttcgctggaaatgtttctatggttttaggagttttttataaaagaaacggagattggaagtttagtgcaatcggaactccgacaaatgataaaaagttggaacaaacaatcgttaccattcaacaaaaccatctataaataaactatgctagaaaatcaattggttgctcaggagaataccgctttgattgataaggatggaaatgtaaacttagcttcaatttctgaaacggaagttaataattacaagtcgatttcaaatcagttaaatgaaaatgatactaattcaattttgaactatggagccgaaatccagaattcaattgcgaagcaaagtgatacttttttaaccaatgttagaacttataattcaggtgaagttggtacgttgataaatgacttgcttacagagttaaattatgttgatgtagatcagctggatcagggaccatttaaacgtttcctgtctaaaattccgattctgaacaaattggtaaccgatgtaaaaaaattattccagcaatacgataaaattactgtaaatatcgataagatcagtaataaggtaaaggcaggaatgatcaattcggtaaaagataacagtgctcttcaaaccatgtttgacggaaatgtgaatcttatcaaagagatggaaaaacacattattgcgggacaaatccgatttaaagaattgggtgaggagcttgctgtaatggaaggaaatccggctcaataccaggattatcaaatttcggataaaagaaactttattaatcgtctggacaagcgtttggccgatatgaaaattgttcgttttattatgctacagtccttagcgcaaattcgtgtggtgcaaaataataatacttcaattgcagagaaagcacaatcgatcctgactacaaccatgccggtttggaagaatcagttaacactcgcagttgctttgcaaaggcaaaagcaaaatattgaagtacaacgaagagtgtctgaaacgacaaatactattttgcagaaaaatgctgaaatgttaaaacaaaacagcattgaagtagcaaaagaaaatgaaaatactgttgtgtcccttgagactttgaaaatgacgacgaaatcattaattgatacgttgacagaagtaaaacaaattcatgagcagggtaccgaaaccagaagacaacttgacgcgggactgcaaagtcttgaagttgaattaaaaaaaggagtgataagctaattgaacagaaatcagttaaatgcaagaggaagaggaacggtttgttcaaataataaaagacagtaatagaaaacttgtgattttagaattgttatccaatttctttagtcacaaggattttgttggggttttaataaaaacaagaatcattcatactctttttgaaaacaataaagcattagacataaataagttagaactctttcatgtacagtttacaagtagttttattgaattgtttcaaaaactaaaaaaagcgaaagagcagcaatatcttttgatttcggatgagatttatatcaatgaggatatcataaccaaattaaaatcagaaattgacgaatctggatttgcagaaaaagcaaagacacatgcgagaaacatgtctcgaaagattgaagaactttacaatatgtttgccactgaaaatgcaggtttttttagttggaacgagattataagtttttccgaccatgttaaacaggagtattttcgggaaattactcttgaagaatatgaaaaaatagactttttgaataagaagctttatgaaaataaacatgtaaagtttgaaaagaaacttctgggaagactaaatatactgaaatttaaaattaaatttttgtgtggactggtttgtaacaatgaagttattgaggtcttcgaatttagagattctaacgataaatttatctttattgcgaatgaaaaagcattttatcttttggatgatgtgttggcaaaagaaattaatattgctaaaaatgactccgttaaaggagagattattacacaattgagagaaaaaaattcagctttaacatttgaattaagtacaataaaaacatcatttcctgaaaatgtagatgaagtattaaaagaatatctggataagatttcatctgtcgattttgtagaagatcttcaaaatgtagatgaacaaaccaatattttaagaactatgttaaatataaatattaaataaagaaaaataaaatggcaattaatttagaaaaaggtcaaagacagagtattgaagctccaaaattcattgttggacttggctgggatagcaattcaagcagcacgggagagggatttgatcttgatgcttcagtttttttagttggtgcaaatggaaaaattccaaatgacaatcattttgtttattataataatttaaaatcgcctgacggagctgtaacgcacactggagataatttaaccggtgccggagatggggatgatgagaaaattcaaatcgatttatctactatatctccggatgtaaatgaaatttgctttgttgtaacaattcatcatgcagataccagaagacaaaatttcggacagattagaaattcatttattcgaatcattgatcagactaatacagagttagtaaagtacgagcttgatgaggatttttctattgaaacagctgttgaattcggaagaatttacaaaagaaacaacgaatggaagtttgaagctgtaggaataggaatgaaaggtggtttacaagactatttgaataaatataattaataccttattaaacagatggctattaatttaaccaaaggacaaaaaattgatttaagaaaatcaagcggcgaatcattaaccaatttttgcgtgggtgtaaactggggagcgattgaaacgaaaggttttttaggattatcaaaaaacgtagtagaagtcgatctggatttgagctgtgtattgattgatgatcagaataagctttacgatcatttgtattctccgttatacaaattagaagtattacaacaatttggacttccaaaaggtaaattgttaagtgttgatggagccttaaaacatactggtgatgatcttgccggtgatactggtggagatgatggtttagataatgagattattacagtggatctttctaaagttgataccaaagtcaatcagatctttttctttttaaacaatgcaggaaaagaagatttctctcaaattccttatgcaaaaattagaatgtacgaaggtactccgaccaacgtggtttcagaatttgcttcttataatgtttctgctgattctcaatatgtaaacaaacgttccatcattatggggaaattatacaaacataatggagaatggaaattcagtgcaattggagatccaactactgatacttttttagggcagactattcaaaaaatagttcagtcttacgtgtaggcaatttaaaatgtagacgcatcttgagtttttcaaatttgagatagtattcagcaagcagatgattttattgcaatccagaacacagaaaatttgcactagatccctttaaatgtatttttttaaagaaatggtgaaaatgcatttagagggtgctcatcgttatttctctaagatttttcaaaatgggacaagctggttttagagccttaccatcagctttagagatcaatgtaaaaatctgagaataatagtttatggtttataataaacagtgcttgtttcaatagcttgtaaatcgtaatattgcccgcaataaaaagtagcttcagagcgaaagaacgctgagttgtgatgttacaatagttataagtaaaatttaaattaacataattaatattcaaaaatgaatcaacaccctattttttcagaacatccgggattaataatcgtctttgccattgcagtagtcatcatgctattgttggatttgggaattttcaacaaaaaaagccatgtcgtaagtaataaagaagcagtaacctggtcattagtatggattagtttagcgatgatttttagtggtttggtttattacttcgccggatcggcaaaattttatgaatttcaatcggcgtactggatagaaaaagcactttcagttgacaatctttttgtatttatattagtatttaagtttttcgacgtagccaatcacaacaaacacaaagttttattttggggaattattggagcattggttttaagagctatttttattttttcaggagcgttccttatcgaactgacttatttaaacaagcttttaagtttggttggagtagaaggtttccaatacgatatcaatttaatcatgacagctttcggattattcctggtatatgcaggaattaaatcatggtctgccggtgatgatgacgatgaagaagattataataacaccagaggagcaagattaatcagaaagtttttcagcgttagtgataaatacgatggagataaattctttaccatcgaaaacggaaaaaaactggcgacaccacttttagtggtagtagctgtaattgagtttactgacttattgtttgcagtagattctataccggcaatttttgccatttcaaatgatccattcattctttacacgtctaatatttttgctattttgggacttagagccttattctttctattggataacttcattcacttgttcagtaaattacaatatggcttagctattattctttcgtttattggagttaagatgattatttctccattttatcatattgaatctctgtattcattgcttgtaattggaggaattctggtaatttctgtattggcctcagtgatgcttccggagccaaaagaagcataaaacataaaataaagaatttattaaagcggatagcagtctaaggagtgctatccgttttttatgattttcgtgattggaacaaagaagccgaagagctaaaactaatttttggtgtaaaaaaaccttctactatttgtttttaaaacgacagtcgaaacttaaattaattgtcatacttttgcactttcaaaaagtaaagtaaataaggcacttaaagcctttactccttgttataatagttacaaattatgcttaatatacacaatctttcggtttcttttggaggaacatatttatttgaagaagttacctttcgtttaggtgccggtgaccgcgtaggtcttgtgggtaaaaacggagcgggtaaatctacaatgcttaaaatgttagcaagagattttgctcctgattcaggggttatttcccaggagaaagatatccgaatggggtttttgcgtcaggatattgattttgaacgtggaagaacggtgttggaggaagcgtatgaggcttttactgaaattaaaattgttgagaaaaaactagaagaaatcaatcatcaattggtgaccagaaccgattatgaaagtgaagaatacggccagatcattgaagctttatctgattatacccatcgttttgatcttcttggaggttacaactatgtaggagatacggagaagattcttttaggattaggtttcaaaagagaagttttcaataatcagactgaaacattctcaggaggatggagaatgcgtatcgagttagcaaaactgttattacaatctaatgatgtattgcttctggatgagcctacgaatcacctggatattgagagtatcatttggttagaaagtttccttcgtaactatcccggagttgtggtaatcgtttcgcacgataaaatgtttttggataatgtgaccaaccgtaccatcgaaatttctttaggaaaagcatacgattttaataaaccgtattctcagtatttagaattgcgtcacgaaattcgtgaaaaacaattggctactcaaaagaatcaggcaaagaaaatagaagaaactgaaaaattaatcgaaaagttccgtgcaaaagcttctaaagcttcgatggcgcaatcgttaattaaaaagttagataaagttgaaagaatcgaagtagatgaggatgataattcggtaatgaatatttcgttcccggtttcaaaagaacccggaaaagtagtaatcgaagctgaaaatgttaccaaagcttacggagacaaaacgattctgaaagatattagtttattggttgaaagaggaagtaaaattgcctttgtgggacaaaacggacaaggaaaatcgactttcattaaagctcttgtcaacgaatttgagtaccaggggaacatcaaattaggacataatgttcagttaggatattttgctcaaaatcaggctgaatatcttgatggagaaattacgttgcttcaaactatggaagatgctgctacagacacaaaccgtatgaaagttcgtgatatgttgggatcctttttattccgtggagacgatgttgagaaaaaagtaaaggtactttcaggaggtgaacgtaaccgtttggcactttgtaaattgttgttgcagcctatcaatgttttactgatggatgagcctacgaatcacctggatattaaatctaagaacgttttaaaagctgcccttcaaaaatttggcggtactttattattggtttctcacgatagagatttccttcagggaatgtcgaatatcgtgtacgaattcaaagaccaaaagattagagaatatttaggagatattaactacttcttagagcagcgtaatcttgaaaacatgcgtgaggtagagaaaaaagatgttgtaaaagaagccgctccaaaggaatctaagaaaacgtcatacgaagatcagaaaaaaggaaaagcacttcaaaaccgattgagtaaggtagagagtcaaatcaaacaattggaaaaagacattcagcacgatgataaaatgctggcttctaattatgacaaacatattgaagatgcttcgttttttaccgcatacaacaaaaagaaaaaagacttagatcaattgttgctggactgggaaattgttcaggaggagattgataattttaatgcttaactagttttcagtcactgtcgcagtcttctgtctcagtgtcagttttcagttttgaaatgaatatacaactttgtcaaaggtttaaaactttggcaaagttttttttatgtctaaaatttaccatcccttataaaaaatagaagagacactttatttactccatgcatttcacaaatcacaaatcacatctcacgagataagaccaatagatttagagtgcataatggcctcgctgctgtctttataataacaaacagagacctctaagttttcgaggtttttcataatcgttttagtggctttttttttgtgtttgccagtctgtctgatgtaaactgcctttacagttaccggaaagattttacagattcgttcgtacaaaatggggtcgtgttgcgaatcgtctcctagtaaaacatacttaagattggggtaaaattctaaaacgtgttttattttgtcgaatttatgatcgtggtttccgcgtccgctcatgaaaaaatcagggattcctcttttgatgtctttcaatagaattacagcccttgggagatgatgtattttggtaaatttgacgatgaatcgatacaaattccattcgctgctcgacacataaaaaaaggcattttcttcttccttattatttcgtcccgctgaacttaaagcttgataatggggtacaacacctttaaaaactttacggtcgttcacgtttttaaataaaaggacatatattttccggaagaaatttccggtatgcgaaatcaaaaaagtatcatcaatatcggagatgatgcccagttttcctttgtgaggccttatgaaactgcctttttcagttatagtttcggtcctgtgttttatacttacttcgtattcaacccatccaaagggagtttctttttccagtggaatacaaaacttgaaatagccgtcgtccagggttttagtgtgaatttcctgatttccgcattttagataaacatcaaaatttttaatggtttttattctgaactgattgatgatcgaagtggcatttttgaagttttttttctgaaaatcatagtcataggttcttctgaaaacatgtcccattacaattaattcttcttcattggcataaccgcgatataattgtaaaattggtttcattaattgtgtatatttatggatgatgtaaattaattattttaattgattttaaaaataaaactttgaaaaagaatatcttatttgttgtaaatccgatttcgggagatctggataaatccgatttaatagccgctgtacaggagttttctgttgttcatcattttgatttggaagtatatgaaaccaccggtaagaaggatcaaaaagaaatacagaccctgtacaatcagtatcttcctgagcgtattgtggtagccggtggagacggaaccataaaaatggttgctgaagccatggagcagtttgatatcattattggtattttgcctgctggttcagccaatggattgtcagtcgatctaaatctgccggatacactcgaggagaacctgaaaattgcttttctgcatcattatatcgaaatggatatgattgctatcaatggcaaaaaaagtattcatttgagtgatattggcgtaaatgccaatctggtaaaaaattacgaagagagtaatttacgcggtttgtggggttacgctttacaggcctattcggctttaaaagaatcggaagaaccttttgtggctacaatctcggctaataacgaaaccgtggagcataccgcaagaatgattgtgattgctaattctcagaaatacggaaccggcgtcgtaataaatccaaatggcgcaatgaatgacggtaagtttgaattggtcattttaaagagccttgatttactattgatcggaaaaattattaccggaaacatgcctattgattcggatgatattgtaattatttctacagataaagcgacgattaaaaccgattatcccgttaattttcagattgatggcgagtattgcggcgcacaaacggatttggaaattcatattctgcacaaacaaatgaaaatagcaatcccgtagtttttatagtctgtgtgaaactgattgtgagaggtaattaagttaaggaaaaacagctaaaaggattgctgatttttgattaacgattttcgatttcagatgttggaggttgtttgaaactgattgtgaaatatatcgccccgatggggctaaaaaacgttggctgaatttatttctatagatattccactcctagcggagttgccttcaaaattccgtaggaatgaacattttgtagcaacggattttaattcgttcaaaatggggtggtgttttaatgagttccataggaatgatctgtataatcgttttcgatttttgattaacgatttctgatttcagatgttggaggttgtttgaaactgattgtgaaatatatcgccccgatggggctaaaaccgatgtttgaatttatttctatagatattccactcctagcggagttgtcttcagaattccgtaggaatgtatatgttgtagcaacggattttaattcgttgaaaatagggatggtgttttcatgagttccataggaacgatctgtataatcgttttcgatttttgattaacgatttctgatttcagatttatagaacgtataaaaaagagagaatatttagtactagtcattagcaggtcagaaatctgcaatcgttaatcttcaatctaaaatcagtatttatttaaacggatttcgttcctgccagtcagttttgggttccaaatagctaaataatcggccgatattgtggttgatcagcgtattgctgtgcgttattaacccatacattttgaccggttttgccccgacagagcttttgatttcgagagcggttctggcaaatactacttctttaaaaccatgattgatagagtaggcaatcatgtcgtaaagcatgttgaggtatagcattttttcgcgttgaatggtctcgtcgtaccctaaaaagtaagtatccatcgcacttccgtttttaattaaggtattgaatccgattagtttttcttctaaaaaatagccgtaaaacaggaaatcatctttcatgatttctttaaaaaaactaaagtgatttcgggctaagaaaaaagtattgaaaggagcgtttttggccacatgaaaatacaaatcgtaaataacatcttcatattttttaatgtcggctaaagacattttttgctttacgattccgtctgctttttttcgggcccgtttgtactgatcccgatatttttttgataaagcgccaatataatcctgttcagatacccagtctttatggatttcaaaaaccatattaggctgagttgaaaacgtgtaattgtttttaaattcgttttgtaaaggaataatttcggtagctgtaaaatcttttatgctggtaatgtgaacctttcttccgcctgctttcaggttttttttaagctgattaatggctttgtgcagtgtttttagagctattgatggtttgatgtctgaggcaagtacaaacgcattttgtccggtaagcatattgtttccgacaaatagtacatgagaggcaaaatttttaaaagcaaaatttcgcaccgaagttttcaaacattgatcgcgttccccgaacgattccagtttctccgtaaatagaaattgggtcagaacaattccgaccagtttactatcgttgaaaattccgataaaatggcatatcatatttaccggacaggagttctccaggacttccaggtattctttggttaaaaagatattagctgccgccagagaattccattccaagggcagtagtgatgcgctattgtatatttcgaaagaataagttgtagtcaaaagagggagctaatttcttcaaaattagagaatatttataagaactcaactggtttaagttattattaagaaaacccgtttgagatttaatttcaaacgggtttgtattttttagagttaggcaaatgcacagataattccgcccatcaaagtaaggcaaaccgcccagtaacctgcatgaataaagatatatttccacgattttctttcgaataggccgttgattccaattatgggaaagacaaaaaagagtgctgacataaatccgtgaagagttccgtgtttaaaggtgcggtaggctgttctatagtcattcataaaagcagcaaatgatggtttagcactgtcgaccaaaggaggtccgcccaccattcccaaagcaccggtttgatggatggtaagagacattaaaattacggtaatcattaacgagaaaagatacgtaagaccgaatattttaagcatatttcctttttgtaagtcttccggagtgagattgttctctctcatccagatggttccgaatactttagggttgtaccagataaaaccaacagccagtgttacgatggctgataagaataatgcaacagggttaaattccataatatgaggtttttaggattagttgctcaaatttaaacaaaaaatctcacaaaatgtgacttagcttaaagtagtaaaattaggattaaattaatttttatcaacactttatcgacattatgagctttataactatgaaatgtataattttgtggtatcaataaatcttgaagttttgtaatgaaaagcttagtcctgttttttctggcttttattttttcgcctgctatttatgctgataccgtttcagataaagagaaagaggcgcttatcaaattgtatgaggtaacaaacggatcggaatggaagataaagtgggatttatcactttcggtagctacctggtatggggtaaaagttgaaaatggtaaagtcgtcggacttcatttggccaataataatttgcagggaaatctgcctgtagaattgttgactttggttaatttggttacgatcgatttacacgacaataaaattcagggacagcttcctttggagattggaaaactaagccaattagaaactcttgctttgtttaataatgaaattcaggggcagttaccagggtcaatttatacgataaagactttgaaagttttgcttttaaatcagaacaaattgtcaggaagtttgagcaaagaagtaagcaactttagtgttttggaaaacctgagtttgtttgataataattttgaaggagaaattccaaatgaattagaaaaattaggacatttgtctgaattgaatctttcttataataaatttaaaggaggcgtttcgaaaaatttgattttattagatgccttaaatatgacgatgtttgatgaagaaggaaatccttttttattagaaatagccgctagaaaagaaaccacaatggttaccagaaattaatcgtgcttatgaatgaattttacactcgttaaaaagtggattaaatatatttagttaattgtttaaaagccgtaattcgttacggtttttttacgtctggtctttacttttttggaatgaaaaataacatttaatttagtgcatttttttttccattacttttttttcataagtttaattcttcaatttgcagcagaaagcaatttagaacataaaagataatctaacctttttaattataaaattatggtagtacagtatcaaggagaacaacacggaaaagcaacaacatttacaataagaattataggaaataatctgtctaaaagcagttcaaattaccagattgatttattggtcggggataaaaaactgcccacttttactacaggaattcaccagagtttgtccaactgtttaaaagagatttatttattcagaaagcaccatggaattacatttgaagcttcgtcagaaaaagtagcaccgcttttagttccgtatgatctggttttatacaattacaataaatatgcattgtttatggcataggccggactttgtttatcgcaacaatttagaaagactgcttttataggcagtcttttttttgtacgactaaactttatcttttcactcatggcattactttttttgcttttttcaattaaaattttatattttttcctttcaggtatttctgtttcataaattttattatgtttgctaaatcgatttagcaacacttagaacccttttgtttatgaagaaaattcttttaacctgcttttttattattgtttctaatgcgtggatcaatgctcaggaactgaagtctcccgatgggaacctggtattgacattccatttaaatgcagagggtactccgatttatgctctgacctacaagaaaaaagaagtaatcaaagaaagcagattgggttttattttaaagtcggatatcaaaatgaataaaggttttcagattgctggtacacaaaaacaatcagaagacaatttctgggaaccggtattgggagagcagaaaaaaattaggaatcagtacaatgaattgaaagctgatttgatacaagaaaaaagcaaacgaaagatttccatttatttccgtttgttcaatgatggtttgggatttcgatatgagtttccggtacaggacaatttgcgtcattttgtgattcaggaagaaactaccgagtttaatttaacgggggatcataaacttttttggattccgggggattatgatacaaacgagtacagttataccacttcaaaaatttcggagatgccatctttgatgtacaatgccgctcacgtttcgatggcagcacaaacaacgattaaaaatctggccgcgcaaacgcctttgatgatgaagacgaatgacggactttatattaatattcacgaagcagctttaaaaaattatccggcaatgtgtcttaatgttgatgataaaacttattcgcttagttcccatttggttcctgatgctgttggaaataaaggatacattcaaaccggaagttttacgccctggagaacgattgtggtgagtgatgatgcgcgaaatatactggcttcaaaaatgatcttaaacctgaatgaaccctgtgctttcgaagatacttcatggattaaaccggtgaaatatattggggtttggtgggaatattttaccggcggaggatctacctgggcgtattctgacaatcaggatgtagtaattggagctaccgatttttctaaactgaagcctaatacaacacatggagccaataccaaacacgtaaaagaatatatcgattttgcttcggcaaatggttttgacgctgttttggtggaaggatggaatgagggatgggaagataataccgcttttaaaaaggagcatatttatagttttaccaaaccttatccggattttgatgtgaaagatttaagtttgtatgccaagcagaaagatgtgaaaatcatcatgcatcatgagactacctcttcggcttcagaatatgaaagacaacttccggatgccttaaagtttatggttgataataactataatgcggtaaaaacgggctatgtaggaccaattattccaagaggagaacaccatgacgggcagcaaatggtgaaccattatacgtatgtagccaaggaggcagcaaagcataaaatcatggtagattcccatgaagcagttcgcccaacgggattgcatcgtacctatcccaactggtttgcgcaggaatcggccagaggaactgagtttgaggctatggaaggaattcatcctgatcacactacaattttaccttttacacgtcttatgggtgggccgatggattatacaccgggaatttttcagggagatttatccgtatacggctcaaagaaaaacaagttgagtacgacactggcgaagcaattggcgctttatgtaaccatgtacagtccgttgcaaatggcggccgatttgcctgaaaactataggcgtttcaaggatgcttttcagtttataaaagatgttgcactggactgggatgacagttatattctcgaagcagaaccgggagattatatcacaatagccagaaaagctaaaggaaaacaagcatggtttgtaggtggaattacggatgaaaatccacgtactgctctcattgattttagctttttacctgccgggaaatcatttacggcaacgatttatgaagacggaaaaacagccgattataagagtaatccacaatcgtacaacattcgtaaaatggctgtaaatagtaaaacgaagttaaaacaaaaactagccgcgagtggcggttttgcgatttctataaagtagaaaagagatagaaataacgcacagatggcgcggatttttttctgatctttgcgaatggaaaatggtttaatctgtggcaaaagaaaaaaacaaataaccggagggcgagattaattcgttcttctcaaagacataaaataatgagtatgaaaatttatccattacaatttgaaccaatcctgaaagaaagaatctggggaggggagaagctaaaaacaattctgaataaaccaattatatcaaaaattacaggagaaagctgggaattgtctactgtagaaggggatgtaagtattgttgcaaacggagagttaaaaggacaattgttaactaatttaatagatcaatcgccaaatgagattctgggaacagctgtttacgaacgatttgggaatcagtttcctttgctttttaagtatttggatgcaagagaagacttatcgatacaagttcatccaaacgatcagttggcgaaagaacgtcataattcttttggtaaaaccgaaatgtggtacgtgatgcaggcagatgcagatgcgagaattattgtgggttttaaagaagattccagtaaagaagaatatttagaaaacttaaataataacaccttagtttcaatactggacgatgtaaaagccaaagccggggatgttttctttttagaaacaggaactgttcacgctataggtgccggtttggttgtggcagaaattcagcagacatctgacattacctatcgtttatatgattttgacagaacagatgctcagggcaacaaaagagaactgcatgttgatttggcattggatgcgattaattacaaaaaagtggatacgcagaaaaagtatgaaacgaccttaaaccaatcaaatgtagtggtcgactgtccttattttaccactaatttccttccgcttgacggaactcttgaagtaagtaaaaaaggagaaaactttacggtttatatgtgtacggaaggccattttgaaattgcctatcaaaacgtaaattatcaatacaaacaaggtgatactgtattgattcctgcaggaatgcgcggttatagcttaaaaggaaccgcttcagttttagaagtatgtatctcataaagaaagtggcggagactatttttgtcacattataggtatttaattagggttcatgaaaattttaccgctttgaaaaatagagaattgaagagaattcatattaaaaacaatagcgatgatcaggaacggaaaaaatgattaatggagaaaatacctgtaaatactgatgattatatgtattctcaatgatttaattagctgaaatgtccaataatctaataatctaataatccaaagatctaacaatctaaagatctaaagatctaaagacctagacagcagtaacaatcgctaaaaagtcatccgcttttaaagctgcaccaccaattaaaccaccatctacatctggtttagagaagatttctttagcattttcaggtttaacagaaccaccgtaaagaatagaaacttcatcagcgatagttgcgccaaatgctttacgaacaacctctctgataaattcgtgcatttcctgtgcttgctccggtgaagccgtttctcctgttccgattgcccaaaccggctcgtaagccaaaacaatcttagaccatgattcttttgcgatctggaataatccgtcgcgcaattggttttcaacaatattaaagtgattgtcagactgacggtcttttaattcctctccaaagcagaaaattacagtcatgtcatgttttagagcagtgtctactttattagcaattaaggcatcagtttcgtgaaaaatagctcgacgctcagagtgacccagaattacggtatttacatccacactggttagcatgtcagcagaaatttctcctgtaaaagcaccgccttcagcctgatgaacgttttgcgctgcaacaccgatagtggtgttttttaatttagctgctgctgcctgcaagtttacaaaagttggtgctacaattacttgtgcggtagtttgtgcaggtattttagcgattaattcgtttaataattcttcagtttgtgctgcgtttttatgcattttccagtttcctgcaacaatcttttttctcattgtggtagttttttattttttgcttttattttattcacgtttatcattgcaattgcaatgcatattgcggtttttattttaaaccttttaagttttcattgattttgtcaaaatctttttcaatggcacgatagagtacaattttcccggttttgtctataatgatgtatctcggaatccagtctaaatcaattgcttttccaaaaacacctttcataccgtcgttcatcataaaatgatcgccttttaattcgtgtttttcaattccggctttccatttgtcagcagttttgtctgcagaaaggaataagtaagaaacagtagggttattggcttgtagctcttttaaatgaggcattgcttttacacagtcgccacaccaggaagcccaaacttcgattaacaaagttttgcctttgtatttttttaaaatgtttttgaaagcaacctgactatcatcggctgctaataatttttcagacaaagcttctttagaaaaactggttttctgagcttgtgagcatgaaaaagtgataaatgcaataaagattagcgttatttgtttcatagtggtaaatgatttcgaacaaagttaaacaaacaaatggaatgccaaatggagattaacaaaatttgaacattgtttcgttttatcacaaaaaaggacgttcaggttataaaatgagtaaagaacgcagtattctttgatgcactttaaatattgttgtatggtttacagggtaatttcatatttatgatcataacccctgaaaggtatactaaaatgttcttaattgctaaattaagaaggccaaagatgaaacgaaaagtaggtttaatattaaaagaggataaaaaaaacgagagactgagtaagtctctcgtaaaataaaacggtaccggagtacagcattgtagcttttctttgattagcatttgggtagttaaactcaaatgtgcgttgcaaactactccagtgtaatcaggaaaggactggtactttgtaaacaatattcggaagaatcaccgaattgaggtataatgataaaatcgatgctaaaaaagtacaaatgacctttttcgatgtctgtaggtatggtaatggaaaattcagtgtatgtaaccgaatccactacagcggcatcgcatgaatcaacagattcccctccttgcgagtttgaaagattacctactattgttgtagcatcggttgggtctacccgtataccctgatctttaatttttgcagtaataactgtgccataaggtccctgaattggggtaaaagaatcaatgattacttttgtttgttctgttgccataatatgttgtattataattaattaataagcaaagttacacaaagaaattaatattgcaagttttttcttactttttttgttgaaaaatagaaatggacttaaatttttgttattaattgtcagtttgttttgtttgaggaaatcgactgtttttttaaagaccaaacgggttatcctaaaaatataagtggcaaatcaaattaagggatttatcaagaaagtctaaggcactaagtaacaatagagtgaaatgatgtaatattcgttttttttgagttaattcaaacttcagtaagatttgacttagtagcaatgcatagccattctttttattcagaggctgttttaaattgatttaatatgactttgtttattatctgttatggagtcttttcatgaggcaaaaaaataatccgttggatgtaaaaaagctttacatgcaacggattatttccatatcctaaaaagtaataaaaccagctatttttagatagcagcaggagttataattttaaatcatccacatcattgtaatgtgctttttgaaccacagttccattttgcagtactacaatgctaggattagctctttcgattgtttttagagtagtggcatcacaaaaatagaagtcaacatgtaagccgtattgtttttttgcttttgcaatttcatcagggcccgaagccgtcattgcaattactttataacctttggtttttgcctctttgttcagtgtttctaattttttcattccctcaggattagacaatgttaaatcatacgttacaaataccaataatttaggctctttcaataatttgtctttgtaatcagaatcgtctttagtcatcgtaaaatcgtgaattggcggcacataaccttctgtaattactttgtctttgcggtcaacaaacgtagcaccttccggaatgttcatcaggtctttttctgtaaactctttatcgacaccatttactttgtagatgaaaatcatttcaacaaccgattttggagcgccttccggaatctccattcccttctcgatattgcttcctactttgtacggacggaaatctttgatcggattgtggttgagtacccaaaccgccataataacacacaaaatgatacttaccaaagtaagcatattggtgatgaatttggagaataatggtttaaccagttttttattgatgaacagtatcagaataaagaaaagtaaaacaatatctttggtgaaagattgccaaggggttaagtgtaaagcatctccaaaacatccacaatcttttacaacgtcaaaataagcagagtaaaaggtaaggaaagtgaagaaaacgattaacaataacaaagcccaaatcgtaagttttgatttgtatcctaccaataacatcacccccagaactacttccagaattactaaaaagatggctaatcctaaagccaatggctccagaaacggcatgttaaaaacaggctcactgaaatactcggctaatttataggagaaaccaaccggatcgtttagtttaatcagtccggaaataataaaaagtactccgacaaataatctggaaaattgggtaatgatgtttttcataaaaataatgattttaaaatttcaaaaataaaattccaaattccaactttttcaataaaattttgggatttgggatttttaagattgaaattttatttagtgataggatttaagattaaagcaaaaacagaataattaatcatgtcctgataattggcatcgatgccttcagatactatagttttccccttattgtcttcgatttgttttacgcgaagtattttttgcagaatcaaatccgtcagggaacttacgcgcatgtcacgccaggcttcgccataatcatgatttttggcttccattaactctttggttcgttttacctgagcatcgtacagttcagttgctttttcaacatctaaatcaggctgatcaacaactccaagctctaactgaatcagtgccatgatcgaataattgatgattccaatgaattcgcctttttcatcttcgtctattttacggacttcattttcctgcagacttctgattctttgtgcttttataaaaatctgatcggttaaggatggcaatcttaatatgcgccatgcactgccgtaatctttcattttattaataaacaaagtacggcaaaccgtaattacattatcaaattcaagggaagtattcttcatttattgctgtatatttgctgaaaatttcttcaaaaatagggataatattgaaaagtttcaagtttcaggttttctttgtttcaagttttttctaaacaaagtgttaatgccggattttgaaactataaataaaagtttcaggtttcaggtttcaggttgacgcagatcgtgtagttttcttaacttgaaacctgggaagagtttaaaaaagtttcaggtttcaggtttcaagttgatacagattgtgtaagttccggaacttgaaacctgaaacttgaaacttgaaacctgaaacttgaaacctgaaacctaaaacttgaaacaaagaaaacctgaaacaaaaaaataagaacaaatgacaattaattgcaaaggccagcttatcgatttatcgattcctaaagtaatgggaattttaaatgtgacccctaattctttttttgacggtggaaagtataaaaatgaagatgaaataattgatcaggttggtaaaatgctttctgaaggtgctgcatttattgatattggagcttattccagtaagccgagtgcagaatttgtatcagaacaagaggaaattgaacgaattgttccggcgatcgaattgattttaaaacatttcccaaaggctttattgtcgattgacacgtttagagccgaagttgccaaagcaagtatcgaaagcggtgcagccattattaatgatattgcggcaggggagttagatgataaaatgtttgaagtgattgcgcactacaatgtgccatacatcatgatgcacatgcggggcaatccgcaaacgatgcagagtctcacacaatacgacgatattgtaaaagagatgttgttttatttctcagaaaaggtaaaaaaagcaagaagctttggaatcaatgatctcattttagatccgggttttggctttgctaaaacgaccgatcagaattatgaagtaatgcaaaaaatggagctttttaatgtgttagaattaccagttttagccgggatttcaagaaaatcaatgatttataaaacgcttgatataacgccacaggaagctttaaacggaacaacatttttaaatactattgcattaaccaaaggggcaaaaattcttcgtgttcacgatgtaaaagaagcagtggaatgtgttactttgtttaataaactgaaagtataagtatttgaatgacaactttatgtgggttttatattaaaaaaataaattatgaaatactttacgctgattcttgctttccttcttttttcctgcggtaaaaaagaggacgttttacttccaaaatccaatgttacgattgtaaaagatgtggaagatctttcaccaatttatatcttctttaaaaccgaaggaaaagataccatcgccgatgtgaaccgaaaaagcagcattatttcaaccaattggattttcaatattgacaagcgcctgcctttaaaattggtcattccggaagtaatgaaattacaagagaaaaagcgagctgacagtgcccataaaaacgaaaatgctgaaaattattattcctacgccgattcgatcggaaagaacttagctttcctgcctttcactaaggtgtattacaaaatggaagttgccaacaacagaagccagttgtattttaaaaagaacgggatgatacaatacagcggaagaaaaacatatgatttccctaaaaatgatttgccaaagtttttagacagtttaatcatcaatccaaaagcgcagattactttttcatttgataaaaatatatcttacggagaatatattcagtacaaaactttcctcgaaaaattggaattaaagcaaaaatctcttgtttttataaacaaagaagaagagtttgtgttttagctgtaggctgtaggctgtaagctttaagctttaggcaataagcaataagttgtattagctaagaagagcaattaataattaacaattgataattattgatggtgataaggttcgttccttaaaatagtaaatcctctatacaattgttcaataaaaaacaaacgcaccatctggtgggaaaacgtcattagcgaaagcgagattttgccctgtgctttgctgtataccgtatctgaaaatccataaggtccaccaattacgaagaccagagttttgattcctgaattcattttcttttgtaactcttcagaaaaaccaacactggagaagtttttgccgttttcatccaatagaatcagttgatccgttggcgagagtttcgacagtatcaattcaccttccttttctttttgctgactttcggataaattctttacatttttgatatccggaataatctccaaatcaaatttgatataaaacgacaaacgtttagtataatcgtcaattaaagtttgaagcgatttgttgtctgttttgccaatggcgataagtttgatattcattgcttattttttgttttcaaaaaccgtttcaaaatgttctacaatcggaaaaggttcgtagtagtggtgtaagatctttttccattgcagataagcctcagaggttctaaaacccactgtatgatcttcaagagtattccaatctaccaataaaagatatttgttttcgacttcaagacatttctctaaacgatgtcctgagtatccatttatagaggaaatgtattgacttgctttcgtaaaatcagcttcaaattgagaggccaattccggtttaacaaaaagaaatgcagcttccagaatcatattcattattatgattttatccgcttaatctgcgagagtaatttttttcccgcagattaagcagatttttagtggtactagtttttagagaacttcgcttcgaaagttttaaaacggttgtccagatccttaatcaattgcttcttaaccgcttcatcctgaataaaactgtagttaatgctgttgtatacgtatttttttatcgttgcataggaaacatcagggtatcgtttggctaataaaacatattgctctgtcatattggtccttaagattccggcatcgtctgtactaattacaataggcacattaaattctttgtaaagtgtaaacggatgtctgttttcctttactttcaaaatgaactcgttactcgttaagttaatctcgattggaatatttctttgagccatgtgacgcaataaatcataagaatttgcttcatacgcaatgtcaacgccatgtccgattctgttggctccggcgatgtgaatagcgtcgttgatgtgccaggttaattcttccggctgaaccagtcctaaagtcagttcaccggcatgaagcgtgtattttacattaggaaacttagaattacagtatttaaacatgaccatgtgcagccagtaatccttcatggagttttcgccatgttccggtgaaacaatgtttacacctgcaaccaatttgctgtcgttggcagaaataaaggcaatcgtcaggtttttaaataaatctacaggatccataaagcgaaggacaaaattctgatagcgcatcgtaaagcgctcgtcgtcaattttcagatccttgtgcagtttggcaataaaattagtgttgaagtctgcagcatattttttggcttctttcttttgaagtgattggtacaattcgtctaaaagctttatagccgctttttcatctttttgagtcgcggcctgacgaagttttgcattgaaatcagcaaggtcagaaacattcatatcacacggaatcgttgataattgagtttcgatataacttacattttcagccagagcacgtttttttaattccagcattccttcagcgaaatgaccctggattgttgattcgaatttttggaaagaatcaaaaaacaaatcatcagaaggaacacttaccccgttataatctttagccgaccaggtttgcatgatttgctgttcataataagccagttttccatcgttttttagagaagagaacgtttgccagttgcctattgaaggtttggttttagataccgccatcgtttctgtattcagataaaaatcttctgcaatagctctttctaaaagaggttctgcataaatcgatccggaaaaatgatggtgtaaatcaccgccttttggcatttgttggaagaaagctgtggagagcgcttcgttatttcttattttttctaaataactatcagccgtttgagaaaagccgatctgtgctatgaaaatacagaaaagtgtaattatccttgtcatactctaagtttaaattacatgcaaatatacgagtttctgccgagatttaaaaattgatttcgttgtgttgtttttttaccgccaagagcgcaaggttttgttatgtgctaaattttatataaacgcaaagttcgcaacgctttacctaaaaaaacttttcgaactttgcgtaattctttgcgagccttgcggttcaaaaaaaacttcttaaaagatttaggttacgctctgctggagcagttttgggaataattttaccgccaagagcgcaaggttttgttatgtgctaaattttatataaacgcaaagttcgcaacgctttacctaaaaaaactttgcgaactttgcgtaattctttgcgagccttgcggttaaaaaaaacttcttaaaagatttaggttacgctctgctggagcagattttgggaataatttttaccgccaagagcgcaaggttttgttatgtgctaaattttatataaacgcaaagttcgcaacgctttacctaaacaactttgcgagtcttgcggttcaaaaaaaacttcttaaaagatttaggttacgctctgctggcgcagtttctggaataattttaccgccaagagcacaaggttttgttatgtgctgaattttatataaacacaaagttcgcaacgctttacctaaaaaaactttgcgaactttgcgtaattctttgcgagccttgcggttaaaaaaaaaacttagagcctcagtccctcagcctctttaagaaaaaagtacgtcgtgaatttcctcgaccttatcaaaaacgctttttgcaaaaggacaaagcgggataattttcaggttattagttcgggcatattctacagcggccatgaccagttttttaccgacgcctcttccgttaaattcctcatttacttcggtatggtcgatgatgaattttgaatcaccagcccaggtataagtcatttttccggcttgttttccgtcttctacagcttcaaaatagcctcttcttgtatcgtttatttgttgaatttccatgatgtgttatattagtgtggtttttatttcgattgaatttgttaatgttttatgtatcggacagctgttagcaatggcttcaagacgttgtctttgcttgtcgtcgacctcgccgataatttctatttttcttgtaaacaaggagattttttggtcgagatctctttcaaagtcaactttgatattgatttcggtaacctcccattgtttgcgattgatatacatgcgaagtgtgatcaaagtacaggaggccagagaagaggccaacagttctgacggactaaatcctaagtttttgccccccatttcttgcggctcatctgcaattacaatatttccgctggcagatgtgatctccgtgcgatacaaacgggtatcgatatgtgctgatagtgtattcatagttatctcattttaggatcaggtaaaggaacaaaatccgtttcgcccggaaccttagggaaagtctgttctgtccagtcttttttagctttttctattcggtttttatcagaggaaacaaaattccaaaagataaaatgttcttccggaaagggctgtcctccaaaaatataaaccgttgtgttttcggctatttcgaactcgcataaagtactgtcgttggtaatcagaatttgtttcggatcgtaaatgtgttcaccgcttttaatacttccttccagaatgtataaaccgctttcgccaaaaagatcctttccaatgttgatttttcggacttcggtgcttttgatttcaataaaataaagcggactatacacaggaacaggtgattttttaccaaatgcttctcccgcgattaatttatacgaaacgccatcttcttcccagctcggaatatcactggcttctacatgcgtaaagttaggatccatttcttccagttctttaggtaatgccacccaaatttgaagaccgtgaagcatcttgtcagaatgtcttaaatattcaggagtccgctctgaatgtacgatcccttttccggctgtcatccagtttacggcaccgggttttatttccagttcggtacccagactgtcgcgatgcataatgctgccttcaaataaaaaagtcaaagtagaaagtccgatatgcggatgtggaggaacatccatattttgatactgatttaaatgtgcgggacccatatggtcgataaatacaaaaggaccaacggctcttttttcacggaaaggcaatagacgacctaccataaaattaccaatattggcagcgcgttcttcgatgattaaactgatatttgacatgttctttgttttagttgaaagcaaaattacagctgtagtcacaatctgtaacttaatttagattaagaaagtttgtttttggtattctttataaaagtaaggaatagaattaaaaagatttgatttgaattgaaaaagaacaccaattttcacgaactaattttgtgttatgattgaactcatagaaacatagaatcctaaataggatgcggaggaagattcaagaaaatcaagattttttcacaaaatgatgagtcttatttaaaatgactttataggtacaatcaaaaactatgtttctatgtgtttaaaaatttactcaatcaatttgtgttaattggtgtgattagcgttcttgttttaatcattcaatcaattcaaactccaatgtttcactctcagtgccattaatgataatagacaactgatgttttccggtatgaaaaacacgtgttgtaatgattttaaatgactgatttcgctctactttaatggtttcatttgggagataaatcttctcactaattttaaagactttttttgccagatgccctttcgcttttctatagtgaacagcatattctaaacgaatcgttttcggctcattatttttattgttcagatgaaattgaaactgcagatagtctccaatttttacaattggtgtcttgatttcaaaagaagaaagttcaatattagcattgttcagaccataatgattcagaatttcaggatgtccctgttttaataaagtacgacagccgtgtttgatgattccatctgtttctttgctatgaccttgccatttacaggcaatttccaagacgatttgcggattgtcttttacgatatcgttcaggttattggcgacacttcgacgcacatattccgaaggatcgttttttaaattctctaaaattggcagaatagagtcagggtctttttttaagtacggaatcgccattgcccagggtaatcttggtcggctaccttcactggccaatctgcgaacatgatgatttttatgcagagaccatttggtcatttcatcaatcatctgttctttgtattttagaataaaaggacgaacagcaaattcgcagcttataaattgcgtgatagaaacaaaggctttcgctgaagttttaaaatcatccaagccgtacatttcaatataatcggcaaaaaatataaatgccagattgctatcggtaaaactgtttttctttaagctttcaatgatcttgtccagtaaagaaacagcttccgggaaattttcaggcataaattgatgtaaaacaaccgtggtgtgtttcatgcggtctttccattctttttggctaaaatcgccttcgtaaatggctgcaatgaatttttgtttgtcaaatgttgggtgtacttcagtaacagcttgaccaaattgttcgtagaaagaaacggagtaaatgtctttaattaatcccatgattttgtttgaatgaacctcaaagatatttaatgtttgttaattattggagctggtaaaagattaagtttagttaagagtttaatctttattttcctcaatcttcggctaatttttcaattttaaaatcaaagcgaagcttttaaatccacaaaatatgtcctactttagcatcatataaaaattttaggaaaatgattagcgaagaacagtttcaaagcgaattacaattattaatcagcaatgcaattcgggaagatgtaggtacgggagattacagttcactggcttgtattccggacacggcacatgggcaggctaaattactggtaaaagaccagggaattattgccggtgttgcattggcgaaaatgatttttgaatacgtagatccgaaattaaaaatgaaagtttttatagaagacggaactcatgtagaatatggtgatgtagtttttgaagtttcaggaagttctcagtctattttaaaagcagagagagtggttttgaatagtatgcagcgtatgtcggccattgcgaccaaaacagatcagtatgtgcagctattggacggaaccggagctaaaatattagatacccgtaaaacgactccaaatttcagagttgctgaaaaatgggctgtcaagattggaggaggagaaaaccatcgttttgcattgtacgatatggtcatgctgaaagacaatcatattgattttgcaggaggaattacattggcaatcaagaaaaccaaagagtatttaaaagagaataatttagatttgaaaattattgtcgaggccagaaatttagatgagattcgcgaaattttattaagtgaaggcgttcacagaattctaatcgataattttaattacgaagacactaaaacagcagtgcaattaataggcaataaatgccagacggaatcttcgggcaatattaatgaaaaaacaattcgtgaatacggactctgcggtgtcgattacatttcatcaggagcacttacgcactctgtttataacatggatttaagtttgaaggctttttaattaagttgtgagttatgagttgtgagttgtggaatgtgagtaaagaaagatacagtttatatgaatctaatatccagtaatctaagaattaaaaaatctaacaatctaatatctaaagatctaaaaatctaaaataatatgtcaaaagagatagaagagcggattgagaaagttcctgtggtgcgatctgtagttcgttttttcaagagaataaaattaccctggcttgaaggtttttcgttatatgatttgcttgaaatgtataccatcggtattattgaaggagcattttcgtatcatgcgagtgctgtttcgttcagcttctttatggctttatttccttttgcattatttattttaaacttaattccctttattcctattgaaggatttcagcaggactttttgcagtttgtgcaacagggagttcctccgaatacctatgaggcgatcagtaagattataagtgatattttaaacaacagtcactccggtttattgtcgtcgggatttttgctttcgatatttttaatggcaaatggtattaacggtattctgagcggtttcgaatcctcgaaacatgtctttgataaacgcggttttctgaatcagtatctggtggcgctggcaatttcactcatcatgacgattatattgtttgtaacagtagcaacaattgttgtttttgaggtattcattcaaaaaacaatcattcaggatgtgttaagcgatcgcattccgttgattattttggggcgatatttgttcgttgttttaatgattctgataacctcttcactattattgcgttatggtacgaggcaatataacaaagtgccttttataagtattgggtctgtttttacaactattttaattgtgatatcctcattcttttttgggatttgggttataaaattctcaaaatataacgaactttatggttcgataggtacattattaattctaatgttttatatttggataaactgtatgattctgcttttgggatttgaattgaatgcctctatcagaaaattaaaacaaaaaaaaaataaataagatgaaaaattggatgttaacgattggtgttttttttctaacattaggcacgattcagggccagggtgtaattggaaaatggaaaacagttgatgatgaaaccggtgaagctaaatcgattgtagagatttatgaaaaatccggtaaagtgtatggcaaaattgtagaaatacttcgcgaaaaccacaaaaaggatttatgtactaaatgtgacggagcagataaaaacaaaccaattttgggtatggtgatcatcaacggacttaaaaaagacggttctgaatacagtggaggaactattttagatccaacaagcggaaaaaaatacaaatgttatatcgcattagaatcagcagataaactaaaacttcgtggttatgttggtatttctatcatgggaagaacacaatactggagcagagtgaagaattaattttataaaaaataataaaatgcgaaaattagcattgatagctttatttctggtacagctatcccatagttttgcacaatctaagaattcgccattacaaataagtcatcttacgggtgacttttatgtttataagacgtttcacgattataaaggtacgctgatttcggccaatgccatgtatttggttacagataaaggagttgtcctgtttgacgcgccttgggacaaaacacaatttcagcctttgctggacagtattaaagcaagacatcataaagaagttgtgatgcactttgccacgcactcccatgaagacagggcgggtggtttggatttctaccgtaaaaaaggaattaaaacctatacgataaaagcaacagatcagattctggagaaaaataaggaagcaagagctgagtttgttattccggatgacaccttgtttacagtgggtaaatatacttttgaagtgtattacccgggaaaaggacacgcgtcagataatattgtggtttggttcaataagcaaaaagtactttatggaggttgttttgttaaaagtgtggaagcaaaagatttgggctatcttggagatgcagatgttaaagaatggcagaaatctattctgaaagtacagtcgaagtttaaaaacccaaaatacattgttacgggtcatgatgatttgaaagatttgacttctttgaagcatacactaaaactggttaaggaatacaatgcagcaaagccttctggtaagtaatactctattgttctgaatcaaaagtaaatttatttttatgatttggttggaaagaagttggtttaaggtccatcttccgttataaatgttataaaatatccacatgttttttatcgaagtcgttttaccgctttcattagctaaaacttttacctatcgtgtttctgaggctgaattccattttattaaaaaaggaatgcgggttgcggtaccatttggtaaaaataaaatttatacggcattggttattgagttgcatcaaaatgaaccgggtttgtatgaagccaaggaaattcatcagatattagatgaaaaacctattgcgaccgaagttcagatcaagcactggctttgggtggcgaattattatatgtgtgctatcggtgatgtctatcgaggagcttttccaagtggcctgttgttagagagtgaaacggttgtttcgtataaaactgatgcggaggtaaatcaggacgaactttctgatgatgaatatttagtctatgaagccctgcagcagcaaagttctttaagaattcaggaaattatttcgatgctgaataagaaaaatattcttcctgttcttcaaaaaatgattgcccgaaatattattgttctagaagaagaaattaaagaaggatacaaaccaaaactggttcgatatgtgaagctgcatgctaaatatgaatccgataatggtttaggagaattgctggaagttctaaaaaatgccaataagcaaaaggaattggtgctggcgtattttcaaattatggcctctgaaaagaaaccaatcactgtgaaaaagttggttgaggtttcaaattctacttcggctgccgtaaaagctctgattgataaagagatttttgaggagtatcttttacagcaggatagagttttgtttacagggcgaacaacagacgatcaattgttgttaagtgaagcgcagactagagcttttacagctattaaagagagtctctcggagaaagaagtatgtttactgcatggagttacctcaagtggtaaaacagagatttatatcaaactgattgaagaatatctggaaacgggaagacaggttctttatttgctgcccgaaatcgctttaacgacacaattagtttcaagattaagactttattttggtgataaagtagctgtttttcattctaaatacagtaataatgaaagagttgaggtttggaagcagactcttgaaaattcggagaaagcgcaaattgtaataggagcaaggtcggctctgtttttgccttttgacaatttaggtttgttgattgtagacgaagagcacgaacagacttttaagcaaaccgatcctgcgccacgttatcatgccagagatgcggcaattgttttggctaattttcataaagcaaaagtattgttgggctcggcgacaccaagtattgaaacctattttaatgcacaagccgataagtatggtttggtgtcgcttacggagcgttataataatgtacgaatgcctgaaattcttttagtggatttgaaagacaagcatttcagaaaaaaaatgaccggacattttagtgatcttttaatagaagaaataggagaggctttgtctttgggagagcaaattattttgttccagaaccgacgaggatattcacctataatagaatgtatgacctgtggtcatgtaccgcattgccagcagtgtgatgtgagtctgacttttcacaaacataaaaatcagttgcgttgtcactattgtggttattcgattgcaaaaccaacacattgtcatagctgttcgagtatcgatttgacgactaaaggattcggtacagaacaaatcgaacaggagctggttacactttttcccaaagccaaaaccggtcgaatggatcaggatacgactcgtggtaaatttggtttcgaaaaaataatagattcctttaaaaatcgtgaaattgatattttggtcggtacgcaaatgctggcgaaaggactggattttgataatgtaagtttggttggaattatgaatgcggataatatgctgcatcatcccgattttagggcctttgaacggagttatcaaatgatgacacaagttgcggggagagccggtagatctgaaaaacaagggaaagtcgtgattcaaacctataatccgaatcacaatacgattcagcaggtgaccaaccataattatataggtatgtataaggagcaattgtatgatcgccagatttacagatatccgccttatttcagaattataaaactgactttaaagcatcgtgatttcgataaattaaaggagggttcggtgtggctgtatcaggttttgagtcaaaatttgaatatgccggtactggggccggaagaaccagcgatcagcaggatcagaaatgagtatatccgaacgattttgattaagattccgcagaaccagcatttggttaatacgaaaaaaactattcagaagatgctgaatagttttgaggctgttgctcagtacagagctataaaagttattgctaatgttgacttctattaaattaagaagaagtggagagtgcttttaccagatcttcttttttgtttcggctaagagggattttggtaatgccaatctcagcaaatttactgttaaagcgttctactttatcaatgttaataatataggatttgtgcacacgaatgaacttgtcttttgaaagatcgttttcaaaagatttcatggtcgagagcaccagattactgtcgtcttcggtaaccactctcacataatcaccaaaagcttcaatccatttgatttttgcagtgaatattttgagttttttcagattacttttgataaatatatgttcgccttcttcttctttgatgtccttttttagtaaatgcatgtcaatggctctttttacagaggcattaaaacgatctaccgcaataggtttctgaaggtaatctgtagcgtcgtaatcgaaagcttttaaagcatattctgctttagaagtaataaatataatttgtggcttagattttagtccgtcaagaaaatcaaacccattaataacgggcatttctatatcaagaaaaattaagtcaatattatttagagagatacagctttttgcctctattgcatttgaaaaatccccgattaaatgcaaacctgggtgattattaactaattttgcaataatagttctttgtatagaactatcattgaatgaaataagaagagggactttcagtccctcgtaaaacaaacctctgcactttcagtgcagagtggtttagttagcagtttttcatttggtaaagtaccaagtgttactattttatctacacctgggtatgattctcccagccaaccgctattttggagtctattaggcatttcggaattcaatgaaaagaatcggattttatcaattctgtttttttcatcatattggtaagaactaatctttacgatgccattattatagtcaatccttgcttttttatcaatcagcccttttggattgtagtaatttcttatatagaaagtggtgtctgttttctctttattgtatcgtatgttagttatagtcacgacttgaccatccgggttaaaattgtaaatataatttatcccattttcgtcattattttttagaacaatactttttaccttatggttcttcataaaagaggaattgaaaggaaagactgtttttgtaaaataaatttcttcctcaaaaggcatgacaatgtaaaaaggttttacctgtgcttcaccattaaagatgatacagcagataaaaatgctggttaaaaatgaaataagtttgtattttgagtataacattttttgcgaaattcaagaatagtaactttatttaaggtcttgttattagcaaatgtattctatatttatttagcattaatagcccccttataaacttaacaatataaaaaatagttatatagggggaggttttatagtttcagatgtttaatatattcgaacctaggcttccgaaggtctttatttgattgaatttttaatagttaaaaaaacatggtgccatgattttgtcacaaaaataaaaatggacaaaattgtgatgaatagcacttaacggccttagctttttgtggcaaaattggaggcaactccaaatcttttttgctgtgattttgccacaaaacttatgcagtataaaaactgtattagttgccttagctttttataacagagaaggtatcaagtccacaaggttgaacgtatacttttcccatgataaattaatatatcttataacattagtaaactttcgttatcatttcatttataggcaagcgaacttttttcatagttgccatgtagtctttttccaaatcacggtatcctaatgcaagtataactgcggaatgcagccctttctctttcaaacccaaaacggcatcgataatagaagcattaaatccttcgataggagtggcatccactttcaattctgctgcagcaataagtgccgttcctagtgcaatataagcctgtttggcagcccaaagtgctttttgctctgcgttgatagtgctaaaataggaatgcaatccatttctaaatcctgataaggcaccagcatcaagacctctttgcttttctgtcattgctatgtaattgtcaatgtaagtcgaagacatgtcagtgaatgcagcaaaaaccaacaaatgagagcaagagtgaatctgtccattatacgaatcagcacctaatttcttttgaatttccggattgcttacaacaaagacacggtaagattgcagaccacaagaagatgctgaaagatttatagcctctaagatctgatcgaccttctcttctgttactttaatgttattgtaagcttttgtggcgtagcgccattttaaattttctatcaaattcattgctatatctatcttaatttttggcaaatataaatgatattgttttctttttcgagtttttgaagcgctctgggaaactccaaatcactcatcttaggtcactaaagaataattatctgtttctcttcattttgatgcatttttaaagattaataatctttaaaaatgcatcaaaaaagaatgattaactgattttgtgtgtaaataaaaatatttaatcttttatcttcaaatttgcagggtaaaaaaactaaatagtatcatcagatgaaagtaaacatacaagaagataggggaataaacgaaaagcagaatattgaaaacacccagaatacaatcaagaatggttttgcattcacactaaagagcacttgtttagatgaaaattatcacccctcaagtgaaacgcggttgacaaccaattttgcaaacctggctagaggaggtaatcgccaacaaaacttacgtaatgcattaaatatgattaacaatcgattcaatgcattggctcatctggataatccaaaagcggatcgttaccttgtagaacttgaaatcattactgtaacgatgcgtattgatgatcagaatggtagtagcaatctgccgttgattgaggttttaaaaacgaatatttttgaccgcaagactagtcagcgtatcgaaggtattgccggaaataatttttcgtcttatgttcgtgattatgattttagtattttattgatcgagcacaatagaaataaacctaatttttgtattcctgaaaactttggtgatttgcacggaaaactttataagtgctttgtgggttccgccacttataaagagcactttaagaagtcaccgattatttgcctaagtgtatcgagcaacaaaacgtatactcggactgagtatcagcatccggttctgggttttgagtatttgcaggatcagtattctattacggatggatatttctctaaaatgggcttgaaggttcgttttttcatgcctttgaatagtgttgcaccaatggctttttatcattcaggagatctgcttgcggattatacggatcttggattaatcagctcaatcagcaccatggagactttccagaagatttatcgccctgaaatttacaatgcaaattcagtggccggggaaatctatcaacctagtcttaaacacgaagattattcactgactcgcgtagattatgaccgcgaagagcgcagccaattggctgttgaacagggtaaatatgcagaagagcatttcattaagccttacaaaagtctcctggaacaatggtctgctaattttaccctttaattgattacaacgcattaaaattatattattatgaagaaattattattacctacctctattgttggaagtttaccaaaacctgcctggctagcaccacccgaaaaactttggtcaccatggaaattagaaggcgatcagctgcttgaagggaaacaagatgctttacgcatttctctgcaggagcagcaattggcagatctggatatcatttgtgacggcgagcagacgcgccagcattttgtaacgacttttatcgagcatttgagcggtgtagattttgaaaaccgtaaaacagtaaaaatccgtaaccgttatgacgcgagtgttccagtggtagtaggcgaggttgcacgtcaaaaagcagtttttgttgaagatgctaaatttttacgtaaacagactaataagcctataaagtgggcgttgccaggcccgctgacaatggtagataccttgtacgacgaccattataaaagccgggaaaaattggcgtgggaatttgcgaaagcactcaatgaagaagcaagagaacttcaagacgcaggagtagacattatccagtttgatgaacctgcatttaatgtgttctttgatgaagtaaacgattggggaatggcggcattagaaagagccattgaaggtttacactgtcaaactgcggttcatatttgctatggttatggaatacaggcaaataccgattggaaaaagacattaggttcagagtggcgacaatacgaagaaatttttccgaaaattcaaaaatctaaaattgatgtggtgtctttagaatgtcacaactccaatgtgcctttaaatttaatggaacttgttcgcggtaaaaaagtaatggtcggtgccattgatgtagcaaccaacactatcgaaacaccagaagaagtagctgcgaccctgcgtaaagctcttgagtttgtagatgccgaaaatctttacccttctacaaactgcggtatggcgccgctatctcgaaacatagccagaggtaagttaaatgctttaagcgcaggagcagaaattatacgcaaagaacttgggatttagtctcaatttattaatttgaataggatttccttgtttgaagcctgctgtccgtagaatttaacagagcgactctgcggacaactaaatgaatctagagaatccacgtttataggcgtaagatatttttgtaatcttgactctacggaggaataatatttaaaacacattgaagaaattattagaagtattaaaaaaagcaggtttcgacggtttcctgttcatgatagccaccatgattctgatggcttattttttgccacatccaggtatggtcaaagaacctgtttcgttggaggagattgccaatgcaggcgtttccttgattttcttgttttatggcatgcgactgagtgttgagaaactaaaagcaggactttccaattggaaaatgcacattgtcgttcagttgacaacttttttattttttccgctcatcgttttggcatttcgcccgttgtttgtcaataacggcttcgagctgctttggctgggtgtattttttctggcagctttaccatctacagtatcctcttcggtagtcatggtttccatcgccaagggaaacattcccgcagccattttcaatgcgagtatttccagtttgatcggagtagtggttacgccgctttgggttgggctgtttatagcttctgcgacaggcgattttgatgttactcaaatcgtcataaagttgattctgcaagtcttgctgcctgttatcatcggcatatgcctcaattcccgtttcggcgccattgccgaaaaatacaagaaacagctcaaatatttcgatcagtcagttattctaacgattatttacacatcgttttgcaagtcattttccgaacatctttttgaaggcttcaccgcccttgagcttgctggactcgctgcagggatgatggcgttgttttttgccgtattcttttgtgttggactactcagccgtctgcttggtttttcagatgaagaccgtattactgttttattctgcgggtcaaaaaagtcattggtacacggcaccgttatgtcaaaagtactttttcagcacagtaccatcaccggcatcgtattgctgccgctcatgctttaccatgctttgcaattgattgccgccagtatcatcgctcagggtatggctcgacgaaaagaagtataatgtttatttatggtgtggccctttatcttttttcgatagagggcaccaaggataacgattcctgctataaaatagtgtgttttagatttttatactgttaaaacaagtttttcagtatgttatgtttttaacttctatgaaataagatttttgtgttgtttttggttacatttgaagaattttattctgatttaagaataaattaaaacctgtttaaaataaaatattctatggaacaaatagacgatattgatcttcagttattaaatatactacacgataattctaaatacactgtaaaagagcttgctaaaatggtaaatctttcgccatcgcctgtttttgagcggattaaaagattggaaaacagcggatatattaaaaaatatattgccctgcttgatgcagaaaaattaaatagaggtttcattgttttttgtaatatcaaacttaaacagcacgatcgtaatatcggccatcaatttgttagtgatattatgaaaatagaagaagttgtggaatgttacaatatttcaggagattacgattttttaatgaaagtttctgccaaagatatgaagcattatcaggattttgtgtttaataaattaggatcggttgaaagtatcggaagtacccaaagtacctttgttatgtcggagataaaaaatatgtatggatagttccgcgatggcttatttatttgaaattcgccttagcttttgtgacagaaaatgtattaagtccattatgtttaaatttgatttaattctttcgttattgtaatacaatattgatctgtttttttagttgttgtactgataatttcgaatcaaacagtataataaaaaaacgacgcagaataccttccgcgtcgttccattcatttctatttaattgatttagataccttccaccatcaaacgagtgtctggtaaatttttcaatggctgtattttaatctctggttttgccattctcgaaattgcatttaatgcagctgcaatagcgccttcttgccaaccaggaagggaggaaatttgatcaccaacaataaaaaagttagcattgctcgcattttttgtgttcggatctataattccggatccttgtgcaatagcgttaaattgtttcgttgagtagttcgcatctccaacggcttgccaatatgcccatccccccttgatatttggcatattttgccaagctatggcaacgccttcttccaggccttcggcaaatttattaccgaatttactggcatcatttcgtgctttggtaagtcgctcattaacgggtaattttccccaatcgtgtgctactttatcaaaattataagcgcctgtgagcacgcctttttcgtcttgatacgccgtagatggataccaaatttgttgaatttcattgtctgtccaagagattcctccaaaaataggtacaactcctacttcggatttttcaactgccattgtcttgagatttattgggcttccttgccataaagatcgatttgcctgccagcccactttggaggtacaggctaaaaaacgcggaacgtatccgtcttctcgcggttcataacctggagcttgtgttggttcaaattgtgccacaaaaacggcttctaatgcatctttaaattcaggttcaagtcccgaatttaggagatcagagtctagaatgtttttcaaaaaaggcatcgcgaggttgcaaacacaataatcagcttcgtaatagatcggttcttctgttccaacttgtccaaccgaaatgatgtacttctctttagttgagtcccattttattttttttacaggactattcaaaagaatatttcctcccaaagctgccacttgttgagcaaaagcgtgttgcacctgatccattcctccaacgggttgaaataaagtaggttgccaaagaaaatctgtaggctgatagaattttgtaccttcccaaaattttgattcgagcaatttatcaaaactcaaaacatcggctacaattccagccgcaacaccaggtaaaacttcatatccagcgcgtgtttttccatcctcgaagccgggtgatccagctgttgcgctataggttccatctgcatccagctctccgaaactgatcatcaagctttgtaattcttcaacgcgtgtattaagattactttcactaattcccacttgtgaattgcgaagtaattcttccgcatttttgtataccatgtgcgccaaccaacctcttgtattatgatccaaacgacggtaaaccataggttcacctccaaaactttcgtccttttgaaccaaattagattcagagttcatcacatatatttcaacgtctaccgaaaaacgttttaagtaagaaaggagtcgtttgtgactgcttggaatacgaccaggacctgcattaaggtaaggttctgagtctcccaccgggcgtttaaatcgaacaacttgaggttctccaggttttgaatcgaacaaatcactgtttgcatcttcaatgagtgtatcccctgtgcgtaagctcatgcagcgtcctcccgttttatgagatgcttccagaatggttacttttgcaccagactcctgagcgagtagttcatacgcggtggtaagtcccccaacgccagacccgatgattataacctcttttccttctagttgatttggactaagtttaatcgcttgattggtaatcgtgttttgcgtttttgttgctttagccaatgcggcgaatgcaattgatcttggattgttttttaaaaattcctgacgacttttgtactgtcccattttgtataaattttatgttaaaaaataaaaaaatgatttctatggtattggtatttttttgggataatctcgaaaacgctttctagctctagattttattttctgaaatgaaattaatgattgaaaatagaaaaaatgaaaaagatgtcgttagtgaaggtttttctgtcgtgaaaggatgtttttttgttgtgaataaaatggatttattccaataaaataaattgcttaaggttatggtatgattgcggttttataaagaagattaaaatgtaaaaaagtaaagcgtacaattattttgtcagccttttacttttttttaattagatttaaaaagatttcaagaagcttttgctaattgaatctgcttctaagtaatatcaggttctgttgcatctaaagctaagttttctctttgcctttttttaatttttaaactgatgaatacgaaaggtcattgctatccgaagtctattatactgcaggcagtatattttaagcttaggtttacattaagctatcgggatgttgaagagatcatgataatacgcggagttcatgttgatcatgctgccattcagtgctgagtttataagtttacacctttcatcgagttagaaatgaagaagagaaaaggtagagtggggacgagctggagattggatgagacctatatcaaagtaaaaggtatatggtgttatttatatcgagcggtagataaattaggtaatacggttgactttcttttgaccagaaaaagacaaagaatgagcgctcagtcttttctaattaaagcaattactaataattgccggccaagagtaataaacattgataaaagcggttctaatactgcagcaatcaaagtctataacaaacgttcattctcaaagattaaaatccggcagtgtaaatatctcaacaatattatagaacaggatcatcgatttataaaatggaggatacaaaatgggttaggctttaaaagttttgaatcggcaagacgaacattgagcggaattgaagttgtgcatatgctgagaaagaatcagatggttagaccagggataactatgtttaaatcattctgtaaattggcggcctaacttttaaattacttaaagtgttatatttgattctgacagatgcgacagaacctttaatttgccttaaaacattaattaagggggaaattaaaaataaatatctgtatgaggcatcagcgctttaagtttacctatagtttctttattcataggatttccaactaaaattagcgttttaagctttttcatgtattgaatttcgttgggcagatcttttagtttattattggctaaatttacacttacagcattttttaacttcataatttttggagaaatccaagatatcgcattatcactcaaatttaggtattctatattttgagattgaaataatgtcccgggaacttctacaatactgtttttttgtaattcaaggtattttaatttttttggcaatttcatttctcctaaatcattaatttgattcgaagagagatttaggtattttaagttttttattttatccaaacgttctgaaacagtacttatctgattactatggaggtttatttcttcaagggaagggatatctaaaagagcttccggaaaaacacttaaattatttgattcaaaactcaccatgcgtaagttttgaagttttgaaatgtttgaatttatagcggtcagactgttcagatttatcgaaaaagattttagtttttttaattcacttatttcatccggaataaatttaatactgtttttattaacattcaaaatttcaagttgctttagcgaaaatattgctttatccattttctccaaatgatttcccattacatttaaaaaaaagagagaatccatttttataatatccggaggaaggttgtataatcctttatctctgaagctcatactgtatacggtttttttactcaaaagtgcagtatcaatatcggtataagttggatatttaaccgggtcaatttgtgctttagcattacagaccgaaaaaacaatgagaatagataaaagtaattttttcataaatatataaaagctgccaacatttctattggcagctaaaaaataaaattaaatggttatttttttagaagttttacagttttttgaaaaccgtcagcttctatatttaaaatcaacatatttgaatattgaagttgcgttgtcaaatctaattccgtaaccggattttgtgaaaaagcctttttatacacaatctgccctaacatgttataagcggtaacttgcagattgttaaggttgccagaagtaatctgtaccatacctgaagtaggattaggagttactataatctcattttgattgtgatcaataatacccaatgaattatctacccctaaattttgctttaaagcaatgacgattgtagctgattttcctctgtaatcaatcgtatttcctgtagcatcaacatccttatcgatacctgagccaggatgttgaatagagaaaaatccgaatttatgatctggtgtaaaagtaagacctgtaggctcagatccagctggcatagaagcaaaaagttttacttttggatttgcctgagtatgatctggtgctatgacccaaatataatttttcccaccatcctgaagaacccaaagatttcctaactcatcaaaagttaaattatcattaccatctccccaagattccgttttaactccatctgttgtatgtaaagtataaactgttgatcctccacctacaaaaatttccacttctgacgcggtcgttccgttatctttcatgcgataaactttgtctaacccttttgctgtaaaatatattttaccatccaaaggacttatttcaacatcttctatcccgttgaatttcgttcctcctaaagattccgccaaagaagtcgtattgttttgatctgcttgtgttttgttaggaacctgaatccaggttgctgttgtagttactggatttccattggttatgccttggtctaatttcaaaacatataaatttcctgaagaaaggttatttggcgtatccatggtgtatttgtataccatgtgcgttcccccatcttcaccataataagctatagttccggcattattaaccacaacattttcgtgattcatgattcccatttgccaaagttttccttttgttccattagcatttttagaagaaacctgagctgtaaccggatcaatttctaccaaccagccataatctttataaccatcaccatttgtgtcattgcctgctacagattcctctgcagtgacgatagttccccaaggtgtaactcctccggaacagtttctgatcgtttgcaccaaactcgcggatgaaaaatctaccgctcttgattttgttaattgccaaagttttgttgttgcattgtaattaatttctgccattgtaactccacccggatttgtttcgtggtttaccgaaagatagccatctgtactgctagatacaccacttgtttttttagctacataaccagtaaagtcatttaggcctcctacaaatcctccaccttcagtgtaattgtccccttctttaagaatcaattggtatttgtgctgtttaggaataattaatttaggcgtttgtactgtaggcacaatagaggtaaaacagctaatatgatttccgtcgttgcaagaggtatcaggaggtataactactggtggaactgcttttttaagataggcatccattcttaaatcagaactgcttgcacttctgttatgtagttcaatcgaaattctgttaactccttgtacaaaattagtttttggaatagagaaaatattataaatactttcatttgctccatcgactgttgtagttgaaaaagtatcgtacagaattgcgcccgctggcatattatctcttactacctcaacgccattcaaaaagacaataattccgtcatctctcattactccgagctccatagtggcactcaaatctgataaattaacggtaaaatctttagtgaaatatgctgcatttaaaggttttgcgatcgtagttgtcacaggatccccatatcctaatggcccatttcctgatttccaggctgaaatatcaaaaccgggatttttccattggtcagctaactgtacaccattgtcattaaaacgccatggtgattctttttcaaaaccattatcaggaactgttttaaggtaggcatccactcttaaatcagaactgcttgctcctcggttgtgtagttcaatcgaaattcggttaactccctgtacaaactttgattttggaatggagaaaatattataaatactttcnnnnnnnnnnnnnnnnnnnnnnnnnnnnnnnnnnnnnnnnnnnnnnnnnnnnnnnnnnnnnnnnnnnnnnnnnnnnnnnnnnnnnnnnnnnnnnnnnnncattcgccccatcgactgttgtacttgaaggggtattatagtcaatgctacctgcaggcatattatctcttactacctcgacaccattcaaaaagacaataattccgtcatctctcattactccgagctccatagtggcactcaaatcggataaattaacggtaaaatctttagtgaaataagctgcatttaaaggctttgtgattgtagttgtcacaggatctccatatcctaatggtccatttcctgatttccaagccgagatatcaaaatcggtattcttccattgatcggctaactgtacacctttgtcattatagctccatgatgaacctttatcaaaaactgtagtctgagcctgaattaccgaattcgttattaataaaagagctgcaattgaaagtaatttttttttcacggtatatagtatgttttgttatactgtgctaagttatttttctgttccgagctttgtattacgcttactttaaataaacacattaataagttagcaaatcttaaggttaatgttaacagattaatgttaagttagtattgtgctttactcgtatcagtcagggagttaataaaagcgacaagctgctttatttctctttcgtcaagattaagtttattaggagacaaggtttgatttttaatttctaaccccattccttcagcaccgccttcattataaaaggcaatcacttcttctaaagttgaaaaggctccattatgaaaatagggttttgtaagagcagcatttcttactgtcattgttttaaaagaattttcataaatccacgagctctctttttttacattgctgtttattctgcctttatcagtgtctatttcaattggcagaaattgcaatggattcttggttacccccagaacttcggattcattttcattataaaacggaggaactaatcctgaaaaattaggggcaaaatgacaggttgcacaggctgcttttcccataaaaagattaaaacctttttttgcatcttcagaaatttctttttcatttctcataaatttatcaaaatcactgttgaaagaatacagtgatgcgacataagaactcagggcttttgagaaattttgtttgtcgatgttaccatttttaaaggcctttttgaaagcttttttatattcaggatttatctttagctttttgatgatactttggtagctggtattaaactcttgttcattgtaaattacatgctcaacttgttgttccagatagtaagcacgcatatcataaaagaatcttttggcaaaaacagcattatataacgatggagaatttcttaaaactgttttgccttcgacattgcttaatgactttgcttttaaatcggtaaaagcattttcgggtaaatgacaggaagcacagctcatttttgtattgttacttaaactttcatcaaagaaaatctctttacctaaagatcttaaatcggcattatcttcagctggttttaagagcgtataaaaatagggattcagaaaatcatcactgaagaagtttttattattggtattccaacctgagatttcttttaaatcatctggagaattatcccaatttcctaattcttcatacaaaggctgaaggtaagttttataaaattctattcggtcaaaagtttcaaaattggtacttttagaaaggtattcaatactagccaccaatattttttcggctttttgagagtctatctttttaaaataatcatccttttttatgtagttctcaattcctctcaaagcatgaatggattcttcaaaaacattaagcgatcctggtgtgtcaaaccccgtaacgcccatggtataaatcctgattagttcgatacgcaatagtaaagttttatttttttcttccgataaaccgttttttaccgaactcagataaaaatcattataactattgtaaaggaaatcggatagttcaactattttatctttttggatattggcttcttccgaaaagataagttcatctaacacctgtaacccttcaggaggtaatgtatttgctgctgtccctgtgctttctatatgaaatagtggtgcggcattaatactagttttggaaaattcagggtaatgatacgcaatatagaattctatttccttatatgaatttctggctttttttaacgactcctgcaaaccttctttggaaattttattttcttgaaaaagatgtgcatccgattttaaaactaccaattgatctttgaaattttttaatccttgactaattatagcatttgtagttgtgtattcattataacctgggttgaaagacattattacaaaaccgataaaaagtacaataagaaacgaaaaagatttcatgtttttatttacaaaagtaatttctccagattatccaaattttaaatttggattaaataattaacctctttgggttaaataaaaggtcagccttcaaaacacttaatctagaatgttattcgtctaaaggaagcttgaggatatagaaagagattaaatccattacatcttaatgaaaaacactaacaactaatattttagatggaacgattgatgatattgttttttaaatgagacatgttggatttattttactctcataaaattatcgaaggataagaattgatgtaacggctagaactatgtttttattttcagggggttaaatagtgaaaaaaagaatagatcagcaggtttctgactagtcccaagatgcagcgggaataggactcgaacttgatagcggaataaataacgaaaataaaaatagcgtaatacatattggaacctaaacttcttaggtattaattttgctgattttttgattgttcacagtaccttgtatcgcgattctgccgtaaaacttgtgaaggtgaaatatctttaaaaaccgccttagctttttgtggcagagtaggaggcaactccaactcaaatgtgccacgattttgccacaaaactttccagcatttttacaaagactgaaaacggtcttaaacgcaaaaaaaaaactgcgaatcccgggatttgcaggttttatcatgttttcttaggccaaaaaaaaagtcctgaaatgtttcaggacttttttagtggggagagcaggattcgaacctgcgaagttcacacagcagatttacagtctgccctcgttggccgcttgagtatctccccgaagctttgtatttgttgcgctttgttgttctaagcggttgcaaatataggaaggtttttgatgtttgcaaacaaaaaatgcacttaattttaagttgtactttttaaagttctagtcggactcgtaaaagcttatgtaagaatgtctttaagaatttcttggggtaaaaattttaggagaaaaatatagaaagatctattttaagacagctaaacagagagaaaaatgaaactaaagcaaaaaaagtcccgattttcatcaggactttttagtggggagagcaggattcgaacttaaccgctcaaacccgcatctatgctacgtttttatgatgtcttaaacctaagtgcaccgattctgcacctgaattttaattgttgcttttcttgatatttaactaattgatattcagtgatattattccgaatttgattgtaaagatatgaatatttttttattattggaaaatttaatttttgatgcttctcagatggaaagtcttttgaagcccccttagttttttgttgtaaaaaaggtgtcaactcaagctctaaaaggcttgtctcccaataatggtaataatctctattcgtttatctccatttaatcggtagtatatagtatcgacaacgcaaacataataccgatatccttttttgaagtggtcggcagatggaaataaaaatggattttgttctattttgtcaaaacaatcgtaaaacatattgaaataattatcggcctgatccattccaaacttaccggcaccatagtaataaattctttttaaatcttctttggcctcgctacttaaatattagctatacatctcccaaatccgttttaaactccgctaacatttcttctctggtttgtttttttacaaaaccgcttttttctcccttatctattttagcccttacaaggtcataaaactcttcttgtgaacgtgctttttttattaaaaagttaatggcttcacttttactgctaaactcttctgcattaacctgattttttaaccattcttcattcggagcagttaatgatatactttgtcgtgtcataattataaaaatcggcttggtgtaaatttacaccaaaattgtgaaaatagaaaaagattcggcaagaacttgaatacaaaaaccgccttagcttttacgtgcaaaaaaggtatcaactttacttggagttgatactttttttgcgactaaaagtcattcaatcaatattattaagcagttcgctgctttagttggaattgtgttgcttttaaatttatttaagagcgtcaaatttttgaaagataaataatttttataaaaagaaaaattattctgctgtgtagtatggcaaaacatattctagaaaccagttaggaaatgtctcggatttaatctccatttcatcattgtataattcggcaatcagctcctgcttggaacctgaattatcaaatagatatgcacggtaacagagaggtaatatggaatgcagatattccaatgtcctataatagcgctgaataacttttgtataatcaacgtcgtgtccatttttgttaacacgatcttcgactctggcaacatttacctcaggactatcgatgcagacgaaatacaaataaattcgatagcctttatttattgattcctgaagttcttgaatttttgaaggatggctaaatacagattcgaaaacaaaggacttattctgccttatcatcaaatgtctgatataagaagcaataaaagaaccctcgtaggtatgtttagacgtggaatgatctacaatgcagttttcacttattgtaatattgattttatgattatctgcagaagctttctctatcaatgaaattgagtcaggaagattactgaattcagctaaactttcctctgatccaataattccaaaatcatttaaatcaataagtttgaagtcctttaatttcctttcaatttcatcagcgttgataaagatttcagaaaaatatgtttttgataactctttttgtagtgtactttttcctgagccgtttggaccggcgaatacgcgtatttttttattacttggcacgaagtatcattcctttaattatattttttggctgttcttttcgtatgatagaaccctgctgttttacaccaaatttatcctctacgtaaattgcatcatcttttatatacgtaataggaagatccaaagctttagactggcgtatagcatttttagcactgtttattccagcgcttataagtgatttggtttgtctgctgtcagttctgaatagtttagcgggcttcatgtgaaagataattttataatacaaatataatgaaatagtaaataactagatgctaaatcatatctgaatgattcaagccattgtaaattttagaagtggatcttggaattatgcaagcggcgcttgcataatttaccttgtctgctgtatttaagtcggccggaagatgagtatgtttatactaactttctgaaagttttagcttctacgtaaatacaattattgaaatgtttttattttaaagataattgccgttatcggcagatatcaatcaatattattgttttaaatttatttttatgccgataagaatcaccagctattggcatgtatgtgaaataattgttattctagattaataagccgcaattataaaacgcttatttttctcaacggtgttgagagttttgaagatttttatgatgtaaaaataattttttcctctaaaagatgtcagcaaattaaatcctttgaagtttctaaccaaacctcggcacatctttattttgctgtatctttactttttcaaaatcaatgtgcgaaagattctgccacaaaatcttaatggtatattatccttaaaaattcggttctgtcgcatctgggaataacttttatctttagaattttaaaccggtcaaaagatgaatactaaaggtcattgttatccaaaatacataattcttcaggcagtatatttcaagctaagatttaagtgagcaatatagattttttcttgttcagattatctaatctttttgcttaatccccaacttttgaacctgatccgtaattacaactgggcgatgtttcttttgagtcttaaagggcattgtgaagacggggaggggactccgtatcaaaaacgaaagttttagctttagcttcgtttaaaaaatggttgttgtaggttgtcaggtgttttggggagacggctgaataagattcgggtatggtctgtgcgctggaataaaataaaagagtaaaaaaaaaccacttacgtttgtaagtggtttttagtaagctccccctcttgggctcgaaccaaggaccctctgattaacagtcagatgctctaaccaactgagctaaggaggaatcaccttaaaggtaaatatgtttgctaaaaagttgctccccctcttgggctcgaaccaaggaccctctgattaacagtcagatgctctaaccaactgagctaaggaggaagttgctgttctttttagcgagtgcaaatataagacgttttttagtttctcaaaaatattttagcactttttattgatttttttttctatttcacaattgccttataaatgtcgttcccattagcaaataaaagtagtgctataagtaaaacgaaaccaaccatttgggcgttttcaaggaatttatcgctcggttttctgccgctaattatttcgtataataaaaacattacatgaccgccatcaagagcaggaattggcaataaattcattactccaagcataattgataataaagcagtgatcgaccagaaggtttcccagctccagctgcttggaaaaatgttgaaaatagctgcaaaaccacccacttgtttgtaagcttttgtctcaggattgaaaatcattttaagctgtttcccgtaacctaccaactgatctttaccttttgtaagtccaaccggaatggattctaagaaagtgtagcttttagtgcttaccttatagtatcctaatttttctaaggattcgatatttaaacctccaacgccaacacctagctttcctgccgcagaaactttaacggtaatgggtactttctttaaatcgcgtaaaacaacagcaggaatagttttgcctttgttgctttctaaaatcgtttttacctgatcatagtatcttgagtcctgaccgttaaggctaacaattaaatcttttggttttaaagctgtatttccggattcttctgtaacacttgctaccgcaaaagggattctcatgtttacaagaggtgccttttcctgttttgacaactgatcgacaaagtcagttggcatttttatagtttgctgttgtccgtttctttcgattaagatttctttggccatgataattttcatgttgatatcattatcgaaattttctattttttgtccgtcaacagccagaaatttatctccggttttgaaacctgcttttagcattacagggttttcaaccaaaacaccatctttcagatctgcattggctacataagtatcaccgtaagcaaatgccattccaatataaataataaacgccaggataaagtttaccgtaacaccacctaacataataattaaacgctgccatgccggtttcgaacggaattcccaaggttgtggaggtaaagccatttgatctttgtccatactttcatcgatcattccggatattttcacataacctccaaggggtaaccaaccgattccgtattctgtttcgccaattttcttttttaagagagagtatttaacgtcaaaaaataagtagaatttttcgactcttgttttaaataattttgcgggaataaaatgccctaattcgtgaagaataataagtaaagataaactcaatagaaattgagagagtttgataactatatccattttgtatttttagttcgtatttaacgcacaaaagtaacgtttctattttaatttgatagtgcaatataatacataaggttttaaatgtttgttaatacttcattcttatttttttaagacagaactaaattctttttcgtaaaaaggaagaaaagcggttcttctctcttgcttcatatatataaggacagatgaatataaaataagtctcatcatgatagttttatggcttattgaggcagctttttgtaaaatgcttttgtagttttcctgctttttaaacgtggaactttatttagagaaagattcgattttggaagatttatgtctcacttattcattacgatagtcgatgagttttataaagaaaatagagcgaatgaagaggattcatcagttaatctgtgaggagaaaacaggttcgccggctgcttttgcaaaaaaaatgtttctaagcagaagccagctttacaatgagctggaaataattaaaggatttgatgcgccgttaaaatattgtaaaaaaagagagagtttttattatgaaacgtcctttgagctagtagtgcattattctcttagtataattaaagacgaagaaaggaaagaaatttttggaggttgagagttccgtccaatgttattggacggaactcttgtaagtttgttgtagtaaaatacttataaagaatttagttttgtttgcttttttcttttacaattaaactaaaataaactggaatgagaaagaaaatggcaaaaattgaaagcttgtttttagggacactaattgttttttatgcctgttcaatatttatggcagtgttttatttcgtgacgaaagtgatgggtcatgtattattgactgtggctcattaaaaaaagctcatgatttggtggaaaaaatgattgacgaaatactttaatattttaaaatcctgaaatcctaacattcagcccgatcaaaaaagggatactatacgctttggaacaagcgaaacttgttttaaatgtttgttaattaataaacatttggatttttacttttaagcagataccgtaactttactttttagagtaccgtcatagccaacaggcggtcgagaacaattaaaagttacaatatgacctcattattatttgctcccttaaccataaaaaagattactttaaaaaatagaatcgttatttcgcccatgtgccagtattcggcaacagacggatttgcaaacgattggcatttggttcatctgggcagccgggccagtggcggagtgggtttaatcatccaggaagctactgcagtttctcctgaagccagaatttcaccttctgatttaggtttgtggaaagacgagcatattgaaaaattaaaaacaattaacgaatttattctttctcaaaaggctatacccggaattcaattggcacatgccggacgaaaagcaagtgtttcgattccgtgggaaggcaataaaaaattaaatattggacaaggtgggtggcagactgtttcggcaagtgcgatcccgtatcatgatgatgagccttttcttccagaagctttagataaaaatggaattcaaaaagtaatttcagattttaaagcagcaacaaaaagagctgttaaagcaggttttcaggtcatggaaattcatggagcacatggatatctgctgcaccagtttttatcgcctttaacaaacgtcagaaatgacgaatatggtggaagtttcgaaaacagaatccgtctgactctagaaattgtagaagctgtacaatccgaatggccgtctgatttgcctttgtttgttcgaatttcagctacagattgggcagaaggaggatggaatccggaagaatccgtacaactttcgatactcttaaaagagaaaggtgtggatttaatagatacctcgtcaggcggattagtttcgcatcagcaaattcctttgcaacccaattatcaggttcctttcgccgccaaaattaaaaaagaggcttctattttaacaggggctgtcggtttaattacagaagcaaagcaagccgaagaaattttgaaaaatggtcaggccgatgtgattttgtttgctagagaatcgctcagaaatccgaatttgcctttagattttgctaaagaattaaacgacgatattcagtggccaaaacaatacgaaagagcgaaactataatattttttttcgccacaaattcacgaatttatacaaattattgtgtttaaaaacttaacataattcgtgaattacttcgtccgttcgctattgctcgggtcatgacagaaataaaatactttttaatcacaataatctgtggcaaaaaactaaacataaaatgcaaaaaataaaaacagcactattatcatacggaatgtcagggaaggtatttcatgctccatttttaaacatacacccggggtttgaattattgggctcctgggaaagaagcaaaaaactcattcagcaggactatccgactgtaaaaagttatgcttcgattgaggatttattggcggatgacgttgatctggtgattgtaaacaccccagtgggaacgcattatgagtatgcaaaacaagtgcttttgagcggaaaacatgctgtagttgaaaaagcttttaccacaacagcagccgaagctcaggaactggatacaattgcaaaagaaaaaggactgaaattggccgtttttcaaaacagaagatgggatagtgattttaaaacggttcaaaaagtaatcaatgatcgggttttaggagatttgatcgaagctgaatttcattttgaccgatacaatccgttattaagtcctaaagcacataaagaaactgtaaatgatggtgccggaatcctgaaagacttaggtcctcatttaattgatcaggccgtttgtttgtttggttctccaaaagcagtttttggagatattcgttataccagagccaataccttggtggatgattggatcgatttattgctgatttatgaaaatttcagagttcgcttgaaagccggtttttttgtgagagaagccaatcctgcttatgtgcttcacggtaaaaaaggatcatttttaaaacctcgtggagatgttcaggaagatgatttaaaattgagtaaaaaaccaaatctggaatcttggggaacagaatcagaagccttgcaaggccttttacacacggaaattgagggagaagtaatcagggaaaaaatcccaacgcttcagggcaattatttttccttctttgatggtgtttatgaggctatcgtaaagaatgaaaaagaaccggttaccgcacaggacggagtaaaagtaatgcagattatcgaagcggcaattgcaagtcatacgcagcaaaaagtaattaatttatcgtgaagttactcagagatttgagggataaaacagattgtcagagattttttaattcttgaaatctgaaaataagtagcataatctataaagtaaaacaaccagaagcagttaacgacaaaaaatctttgcccctttgcttctcagaaccttcgtctctaaaaaaaattataaacatacaacgttgtaaatcgagtaatactcaggttttataggccataaagcagctttttagtacttttatagtgttaaatccaaaacgaattattttgatcgacttcaatccattagcattattccagaccaaaggaaaaattaagaaagcttacagagaagctaaaatctcctatttgaaccgaattcgcttggcagttgggatgttttattttggaatgggtttaagttttgcgacctgggcaagtaggattccggacattaaaacggcattacatttaacggaaggagatctcggttctattctttttgctttgccgatggggcaattgctgattatgccattctcaggcaagatggttacgaaatttggcagtcatcgaattttgattctttccttaatcatgtatgttttgtgtctggccaatttaggtttggctactacggccttacaattgtcattaggattgtttctgtttggattgtttggaaatctggccaatatcgcggtcaatacacaaggcgtttataccgaagttctttttaggaaaacaatcatgtcgtcttttcatggcatgtggagttttgcaggatttaccggggctttggtaggattgggaatgctggctctaaaattaagtcctcttcatcactttttgattgtggcaggagtcgtattaataatgattgcttttaactttaagtttttaatcaaagccaaggaaaaaatcaaagtcaagagcgagaaaaagaaactatttgtaaaaccggacagcgctttaatctggcttggagtgattgggttttgcagtatggcaagcgaaggtgtaatgtttgactggagcggagtatactttaaagatatcgtaaaagcacctggtccgttggtgattttgggatacacttccttcatgattatgatggcaagcggacgttttctgggagacggcttgatcaataaattcggacgtgaacgcgtgatgcaaatcagtggtgttatgatttcggccgggctttttacagctgtttttcttccttatcttatcccttgtacgattgcttttatggcagttggtttaggagttgccactatagttcctaccgtttatagtatggcagggaaaaatccaacagttccacccggggaagccttaactattgtttcgagtgtaagttttctggggttcttaatgggaccaccggttatcggacatatcgctgaaactttcggacttcagttttcattcgcttttattgggattttcggagtcctgattgcttttatggtttccaaaattaggatagcctcttagtttgtgcgctaaaaaagcgagggtttgttttgatattaagatttatttaataagaaaatactttattattgctttttgtttatatttgaatcctaaaaaaataacaagtgttaacttcttatttttcattccttccaaaaacctattttatcttttgatgtaagagactggatgtttttgttgttaaaacattcaatcctaaaactaaaaatataaagtaaattggggtttttatgacaaaaaaaggaacgttactatttgttttattgcctattagtcttctgtttgcgcaggaacacaccactttttcaggaactatagttgactcaaagactttaaatccattggaaaatattgtggtaaacattcaaaattcttccataacacaattaactggagcaaagggaaagtttgaattgcactctgctataaagggagagcaattattatggatacacagtcaaggctataaagatcttcttttaaaaatacaatcgaaaccggggcaaaaggttgaactggggattttaccattagaagataatttttcagaggagacaccggcagcactaatcaccttattagacagtgatttttcagacgataatagttcttctgaaatgacttcgggtcttttgcaatcttcaagagatgcttttatgcaggctgcagctttcaattgggggcaggctcgatttagagttcggggtctggacagcgaaaatggtacaatgatgcttaacggcatggtcatgaataaaatttacgatggaagaccgcaatggagcaattggggaggcttgaacaacgtattgcgaaatcaggaattttcagttggagcagctgcttcaaattatactttcggaggagttttaggaacccagcaaataaatacacgtgcttcattgtacagaaaaagcagtcagctttctttttcagggagcaatacaacttacagttggcgaaccattgctacttatgcctccggaatgaatgcttccggctgggcttatgttctttcagcaggaaaacgctggtcggatgaaggttattttgacggaacaaatttcaaagcagaatctttttttattagtgtcgaaaagaagctgagcgacaaacattcattgagctttacaggattttatacgccaaattcaagaggaaaaaattcggcaaatacaaatgaagttacccaattaaccaatgagaaatacaattcttattggggatttcaaaacgggaaaaagagaaatgcgcgagtaaaaagagtcgaagaaccggtattgatgctaaatcattattacaaaataaatgagaaaacaaatctgaattccagtttaatgtatcaattcggtcaggtaggaaacagtactattgactatcaaaacgcagccagtcccgatccggtgtattatcaaaaattacccagttactatacctcaatctacgaaaaagataaaggggagttttcaggaaatttcacccccgattatataaatgccgaaaaagcaaaagcaaattttctcgaagatcgtcaaatcaattgggatgaattatatcgtgccaatcagaaaccaattttaaattctgatggaacaattaacggatttgaaccttcaaaaagtcatgatgtcttatacgaagaccggacagatgataggaccttcgcggtaaattcaaatctgaatatacaattaacagagaatactgcttttgatggaggaattacttttagaaatttaaaatcacatcagtttcaatatcttttagatttgttgggagggcaatattttgaagacattgatgcgttttaccaaggtgatcagtcacagtctgatttgcaaaatccaaatcgtcaggtaaaagaaggagatacctatgggtgcaattataatctttttgcaaccacaattgatgctttcacacagtttaaattcagttataataaaacagatttttatttaggacagtcttattctgtttccaattaccaaagagaaggattgtatcaaaatgggatttatccaacatcatcacttggaaaaagcaacaaggtgaattttgaaaattttggttttaaaggaggtctgacctataaaatttcaggaaaacaatggttgttttttaacggaatgcatcttagcagagcaccatccttacgaaacacgtttttgaattccagattgaataattcaatagtcgacggaattgaaaatgaaagtataagtagtgcggaaggaaactatgtttttcgttctccaaattttaaaattcgttcaacgttttattattcattgattaaaaatacaatccgaacttcttttttctttgctgaaggaatttttgatcagggtgcaccttacaataatacggatgcatttgttagtcagactttaacgcatctggacaagaaaaatagtggtatggaatttagtcttgaatggcaaatttcatcaactttaaaaatgacttcatctgcggcatacggtaattatgtctatagtagtaaccctaatgtatctataactaacgatgcaaatgtagcagaaggcggtactcagaccacttttgattttggagaatcctatcttaaaaactacaaacagccgggcatgccccaacaagcttattcgattggattagaatacagagatcctaagttttggtggttcggagcgaatattaattatttgactgaagcttatattgacgtttcgccaattgcacgaaccaatcggttttatgtaaacgctgtgaatggtcacctatttccagaagcgacagaagaacggacagttgctttactgaaacaggaaaaaattaatccggtttcattattaaatattacaggaggaaagtcctggcgtatcgctcacaaatatattgggcttttctggagtgttaataatgttctgaatgcagtgtacaaaacaggtggatttgaacaaacccgaaatgctaatttcagagctctcaatcaggatgtttccagcggaacaccctcatttggttctaaatattattatggatatggaagaacttattttgtgaaccttacaatgagtttgtaaaattttaaaaccaatttgaaatgaaaaatagattcttagttttcggttatgcattcttgctactgataatttatagctgcaataatgaaattgaaattccaaaactggaatgtacacaaccgaatttagttgtcaatcaaaaggttcagaaagtgaaagaattttcaggttccgttccgaaacagtatggctacgatgatagtattgaggcctatgtggtgtcaagcgatgaaggagggaatttttttaagatacttttcctgcaaactatcgcaacggatgaaacaccggcaataggatttagtgttgcggttgatgttaccaacacctatatcgattttcgggtagggaataaagtgtatatcaaactaaagaatcagtttacagatttatattttggtggtttgcgtatcggaagtttgtctgtaagcaattcgggagatccagtgattggcagaatttcgcagaccgactataaaaatgttcttaatgcgtcttgtaccataatggatgaaagtaagttggtgaaagctgtttctgtggaagaagcgttaaacgacggtaagcttaatacgctggtggagttaagcggagtccagtttgcagaggaagcgattggtcgtcattattttgaagagtccaacaatgtaggaggttcgacaaactggaaccttcaggataaaagtgggaatcagattattttcaggacaagcagttacgcgggctttgctaataaattggtgccggaagggagcggaaaagtaagaggagttttgactaaatacggatcagattatcaactaatgagcagatcagaaaaagatttggaaatgaatgggaaaagagatactccgatttttgcggaagatttccaatccgtaaaaaataatgtgaattttactttgccgggatggagtaatattgttgaaaaagcttcaaaattatgggagagtatgctgtatgccggaaacggttatacagagtttaatactacaagtacaaccgcagccgaaaatgttgcctggatggttactccaaaaatcaatttgagcggttataaaaatgcagtattatcctttagaagcgcacagcatgacttaaaacttgattcaccattaaatatgcttgaggtttatgtttctactaatttcgacggttcgagcgtaaccaaagcaaaatggacaaaactaacagcaaaattcccttcattgtcaacaccgtcccgggtttttatcagttccggagcaattgatttatcttcctattcagggaatattaatattgcatttaaatatatgggttcgggtaaggataaaactttgaatggtgcttttatggttgacgatgttaggatttttgccgaaaaataagactgttttttatatggattcagttaagatgttgatttttaggggacaatttaatgttgagctgtttttcagatttaaactgttaaattttaatagaattttgtattttggtcaccccaaatcaatacaaatacaactatgaaaatctattttcttgccatcatcatgatggtttttccatgtttagtacacagtcagaatcaggatgctgcacctgtgagactgaaacaaattaatattgtaaaaacaaattaccagaattctaaagatggtgaaattgtaaataaaacagttgtttttaaagacggaaaaatacaaacgattactacttcagatgttattcagcatttcttttacaacaccaaaggattattggacatgaccgtaaaagataaggtaggaagcgactggaaagaagttgttaattatacgtatgatgccgacaacaacattacaaagtttgttaaaaaatatcaggaagggaacgattatattaccaaagttgtaacttttacctacgagggagcgagagtaaaggtaattacaaaaaagagcaccaatcaccagaatttagttgacgatatcgaatatattgttgaaaaaggaactatcgtgagacgtacttcccgtgacagaaataaagcaattattggcaaaattgaatatgcgtatttcaatgataatgtcataaagcataaaggtttggtaggagataaaatttcaaaaagttttatttttgatgataaaaattctgttgatcttctaattgttaaaagtttgtttggagagaattataaagtaattgtaccgatgatctcctatcatgaagaagaatttagttttgaatccatctctcctaataacgaaatcgtttttagtccttcctctactgtattggtcggagtgagcagaaaatacaaatacaataaactaaactttccaatttcctgttctcagattgaagaaaacggaattgtaaaaacagagaagacttttatttacgagtaacgtaaattttaaaactgaaaatccacatcccaaattccaaacttcgattaacaattggaatgtgggatttgggatttggattttttaaagaatagggtaatttttcaaatacagtttaaaaaacaagttctataagggttagtaccttacaaatcattaaatttgcaccttattcaaagctatgttagaaaaagaagttataaattttgagcgaactgccattgtaggtattataactcaaaatcaaagtgaggaaaaacttaacgaatatctggacgaattagagtttttgacttttaccgcaggtggtgaagtgattaaacgcttttcgcaaaaaatggaacgtccaaatccgaagacttttgtagggacaggaaaaatagatgaaatcaatctttttgtaaaagaaaacaatatatcgacgttgatttttgatgacgaattatcaccatcacaacaaaagaatatttccagaattatcgattgtaaaattttagatcgtacgaatttaattttggatatttttgcacaaagagctgagacctcttatgcaagaacgcaggttgagttggcacaatgtcaatatttactgcctagactttcaggtttatggacacaccttgagcgtcaaaaagggggtattggtatgcgtggtcccggagaaacggagatcgaaacggacagacgtattgtgcgtgaccgaatttcgctactaaaggataaaatcaagaccatcgacagacaaatgagcattcagcgcagtaatcgaggtgcgatggttcgtgtggcattggtaggatataccaatgttggaaaatcgactcttatgaatgcgattggtaaaagtgatgtttttgttgaaaataaattattcgcaactttagacaccactgttcgaaaagtagtgattaaaaacttgccgttcttattatcggatactgtaggttttattagaaaattgccaacacaactggtagattcgtttaaaagtacgctcgatgaggtgcgtgaagccgatttattattgcatgttgtagatatttcacaccctgattttgaagatcatatcgaatcggtaaaccaaactttgttagagattaagagtaatgacaaaccaactattatggtttttaataaaattgatgcttacaaacatttgacgattgatgaagatgatttaattacggagagaacaagaagacattatacgcttgaggaatggaaacagacctggatgagtaatgtgggacaagataaagcactgtttatctcggcaacacaaaaacagaattttgaagaattcagagaaatggtttacgaggcagtccgccagattcatatcacaagattcccgtataataagtttttgtatccggattataaagatgcagttgagaaagaagaggaataaagtcccggatttaagcatacaaacctcccttttgactttttcaaaagggaggtttttttataagctgctaaacctgccaaatctgtgaggaattctcagccactaattgtcctcgtttttttgccacagattaagggatcaaaaagtctataatgaagaggtgttttattttcttaattttacatatagtaaattagagtatctgcctttatataagtcatctggataactaaaactaattatagtgccgtttaataatccttttacttttctgtctgaaaagctaaattcaataatgatctcattatcattttcagacttattagatttccaagttccaacggaatttgtctttgtattatcgttttttaattcaaaagttttatctgcattgatcaataataattgatactcttctgctttaactaatgtatcccttgtgacaaatttatcaatttcatatttaccaatgatttgtttttcctctatttttgaagaacaacttaaataaagggtaaaaattgacaataaaataaatttatataaatttttcatagttctaatttatatctcttacttcggttaatatatgttttgagtattttccatccatattatctgaattaacagtttcatttttattatgcggaatgttattatcagcacctctaaaataataattttctttacggtcaacctgtaatctaaatttatttagtgtcgtatcagtgccaactgatttatctgttgaaggagattgtccggaaaattattttcattcgcaactgaattaactgaacgctgtctatttaaaacttcatttacacaccgaagtttaaactcataattgtacttgatttttctttccataaaaatgcctgcaaatagtgtctaactttttgggggcagttcataggaatggctttttattttgattactttcaccagcgggatgttcacgctagaagggtctaacgttttattgtagataaccaaatagagtcatttgattttttggtataattataaatcaattctaagtcattcatttttttatttttaattagaattatattattttttacaatataatcttcattataattattcagaactaactccattttcttataaaaatcatttggaattttatttgtatttacaatatattcttcgtgttctaaatttacaggataaagatttacatatttattactccaataataataaacagagaataaaactatagataacactacaaccaaaaatattttttttttcattttcattttcattttttttcaaaataataagttttttaatttagttgtaatactatttcaacttaatggttttaaaagattcaactaaaatttcttgctcctctttatttaaatttttacctacaatcgataatgcattgttattaattttactaaaatagattcctgtttcacctagcttatattttttaggaacttttatttttgcaacttttctgttgatagtgtcatagtaataatactcttttaaaaaagttccttgcgcttggtcaatttctggagtatccgaatagtgaagcccattaatattcatttttaaagaatcatattttcgaatctgttctttactaaataccttatttgttttattaaactcttgggaatattgtcccaaatcaaaatatattgaatcattgtttttagttacaattatattaacgttcgaatcgattccttttgttttaatttttttccaacttgaaggaagagatatagaaaaactatcgaaaccgaactcttgaaaattatccttctgattacagctaaaaaataaagatataatcatacattttaataatattcgtctttttttcattttaccatgttatattattactacttacaaaactatttacctgagacttgataccgcttttataactagtgtttacagttgattggcgataagtaccattacccgttgattgagatatttgacctgctcctccatttattatttctcctctttctttttggcttgtacttaatgaaccatttacacttgggttcattaaaccaccatttttatgagacaaacctaaaaagatgtccaatttcatgtgttgcagcctcattaaaagtcttattggcaattgtacctttctctactgcacttactcttcctcccttctcagccaaaccaacagggtcagtaccatccttcatttttggaatattatctgctaatatcatcacatggtcatcttttccaacatctgataaagatttaacaaccttgtatgttactgatacggttaaattatctgaatttgtaatatcaagagctcgattatcagtttgtgcatttccagataaggatgataaagctacactgcctgaggatttattgaacattgttttagataaatcgacaccatcactattaacaacagttaaagtcatagtcatgttaacatttctttgtttataatgtttatctccttttgtatttgaaagtttagttatagtatcattagggtcgctggcttccataccatctgggtcaataaagtacactggattattaagcgcataggtgtaaggattaaatctcctacttttttccgccagcgggtcaatattcatccatcttcctaatacaggggcataattacgtgctccatagttatacatgttaagtcccagctcgtcttgaaactctatttcattgaatttatatttattatttaaattgtcagatcccgtataagtttcgtttagatcaaaataatcacctaatttaggatcttcactattattctggttttctacatagatgctgtcaaatttattggtgttatttatatattgtgcatcataaagatcgttttttatagtgatctgaccaagtctggtagtattgtttgtgtattttgaagcaaatttccctaattactgttgactttgatattcaatagcttgtacggatggtcagttctgtaaccactcataaccagataaacataatattttttgattgctgatagaatcacaaccctatattttctgttagactgttgctcgctgatttcttccatgtactgaacgatattatcggatttgtatcttttaacttttggattcatttttagaaaatgattgatagcaaataaatagctttttactgtttgtccactatagtcctgaatttactcaataaatactaacgaatctcgaaaagtgtagctttttggcacttttttttcaaaaaatttttttactgggtcaatatgtgttccaaaatgagacactgttccgggaaatttcaaaaactgtagaattttcgtttgcattatcgatgatattcgttggaaatattatatattttatactacaggcggataacttgactgtttaaatcttggaatttagtactaaaatagccgatacagggagggaggatgctctgagtgctatttttccatactattgagattctatagcagatgcaggctaacttgaattctattttaaccgtttggtacactttaaagtgttataaaagcaaaaaaccactccttatggaatggcttctttgttggtgtcgaatgaggattattattaacgttgtgtattaccagtttcaataacaattctatctccaaactgcttcaatatcccataggaattgaagataatttttttgctagtaaaacttgcttctttgataggtggattactataaaaagtacgattgtttatcatagatgtaaagccgtcagcctcgtcatctgtctgacatatataaccgtccttttcctttagtgacttcgtatgattaactaatccaattatttttaaatctggtacgataacaagatatttatatagcttttcatctccagacacgtttagtttatctgaaataagtgtatcattaaaacaaagaataaattcattaatatctttttcctcgccatcaatactagatttgacaatccttgagtataattttgcaggtattattgctcccgtattactaacaatgttatagtttggcagttcaggtagttttcgattgcatcttaaaacaaacatataaaatattataaatagtgttaataggctaataatgataattgtgaatttgtatttcatgataaatattttttatggatattgtttgtatgctggattaacagatgtatttggcattgtaccgcccgcacctcctacatatcttctataaacgtaacctttgtttccaggaaaatcactaaaatgacttggattagagccaaaatcagttacgtgaacttcattgtgtcccgcacctattgattcagtacttgaaatcatgattgcaacatgtcctgtagcattagaaaaattacccgttatagcgacaatgtctcctgcctctggtgagcttacaatttcccatcctggtatcgaatattttgggtctgcccattgaccagcggttactggcgaaccaaatccaatcaatcttttcaaaatatttccatttcttagcggtggagcaacaccagtcttttttagtatgtcgtacacaaatttattacatttatttgtttcctcaccaaaatcatctttactaccttcgtatgaataatttgtcgacttatctttacttttagctgtttttacaatttcttgcttctttttgtcatctccaggtccaccgtcaccagaatcagaaccatcaacttcttcactggcatctacagcatcatttccatttgtaaatgttccatttccactatttgtccattttgtttccttatcatctgctgacttgctccacatctcatcaatagcatcttgtgagagcattccatcagggtcaataaatctagttggattgttataagcataattatatggtgaccatcttctcgacatttctgccattgggtcaatgttcatccaacgaccaagtgcagggtcataatttcttccaccatagtcataagtattaagtccaagctcgtcctgcaactcttttgaattgtacttatacttattattagtaggtacataatcattatacccattgtgtttcaacccaaaaggataataattatgtttaaatcaatcaaagaaaaatccatataaaccattccccaataatcaggtaatataatattaaatttcgagcttaataatgttctaataatgtcgaaaattagatttttcgcgttttccaagctcatagtagaacttggaggctgatgaccagttcttccatgccttgcgtagaagcctagaacttcatagttatttgctgtatgtgtaaaatcattaagagcgtttttatatggtatcaaaaatgttttatcatgggttgttttcaaataaaatctgatatcatcataaattatgtaaagcattctatagtcaactttatttgaaagaagaaagaataagtttgtcagaaaaggatccttacatatttcttcaaataatatgtatacaggatttattggttggttgtttgctgattcaactatttcggaaaagtcaacatcaattttgtaaatctctatatttggcactttctcaaggtatctcttagattccagatcataaatgttacgtattttaaaatagttgttgccatttcgatttcgatcaagaagggtataaataccttgaaaaacagcaataatttgagtcgcagtatatgttatttcatttatgtctgttaaatttgaaagcagcgatgaagtaaaataaaaatgccttccaccatgatcgtgatcttccaaccaaaaaaaggaatgattggtattattattttttcctagaaaattttcaatgtgaaatttggaatcgatttctatgctgtatcgtaaagtaaaactcgtgctcatttattttattaaggtttttttgtttaatgaatctgcaaattactaagttacaatcaaacttatctattagttcggcagtctttattcaacttaaagcaggaattatgaattactgctttttctatttttctatttttatcattaaggcactttaggcctacattagaaatggtgagtgctgtgtcaaaatcgccttttatggcatataaacaagctttagcatcgtaatgattgacatctttttccaattggatttcttgatcaattaattcttttaattcttcaaaattgtaataaatactgagttcagggttcataatatgtaaccaaacaaaattaccatacaaatcaggtctcctatagctggatttaattgcactggcgtataattctctggcatttgtaatactgatcaatggttttgcctcaaaaatattatctgctaaaagggttttataatttgatatgacttcatttgctttaatttcgtagggataataattattaccatagttctcttgatattggattacgtgggaatcagaatcgttagaatttttgtgatcaagtgtaccggttgtggtctcccaatttaaatgtgttccatttttaaaattccatcttaaataataatgctggggtatctgtattattgaaacaggcaagttaagcatttctgtaatgccaagataaattcggcaatactggtcacaatctatttttttgcattttttatcctttttatctttccaatatttaattctgtaatcgtttaggaatgtataccgatatttaaaggaaaattcttctcttagtgccaaggttaaaattgtaaaatgataatcagataagtcgttgtcataaagaaaattaaattcagtaaatgtgctgtctatcatagagaaaatttcctgaacttgtaatgctgttgcattttgcatttccgagtttgtgaatttcttttgaattttgttcaacgcggatctcgtcagtttcctgcaaatagttatttcatcattattgttaccataaagcttagaatccaaaagaagttgttggtaggtggtagtttgttcaaattgaatattttcatttgacaaacaataatgattaaagcttaataaaaaaagaaatgtaactaactttttagccataattttttattttaaaagattatttggatgatttattttatgaatttgccaaaagtcaaaccgacatttatacctataaaatgatctttatttacttctttccaggcaatctcaaaattaacagttggttttccatccttgtcttttaaacttacagggattcccaacttccaatttacagtatcaaaatctccgaatgttttttcaatctgtgtactaagtcccattgcctggtcaaaaaggaaaaagcttatacattcaccgcttattgatggggttaaaaatttctgaaaatctccaccataaaccgtcaggtttttttcaatcaacgaactattttgggaattatagactggtaaggtgtatttggtcagagcatcagtttctatattgttattgttttttatgtttccaaataaactgacgtaataggatagacctttactgtatttggtataatatgttgcacctgtcgtaaaagtccatggatagaaattctctttttgatgatcagttgtgctaatatcctttataatttcatattgacgaggtgaaaccggtaaatagaattcagtggaaatccaccaatcagtctttttctcatacagtctatatttgcgtatatagtcaacttcttgttcggcaatgctattgtaaaaatcttctttttttatggattcatccaatgatttggaataaagattttctttggagagtttgttaataatttgctctcgaaattcattaatcattttgagctgattgtcttcataataaatactgccattggctataaaatgatattttacattaattccaatgtctttattaaggtttccgtttttaaagatggaactaaaatcatcgtcaacttttgctttaagacctattgaaaataaatttttaataggcagttctttatcgcacctcaaagtaaatgtacctcccaaaaatagcgttttgtctgaggtactcaatacagcataagttttttgaaaggtaagatctttagatgatgttgtataacttgatatttctgaggcaaaaaaactatgtgttactgcaggagtcgttaaaattgtattctttttgttcagatgctgttttcggaaagctgatttaaaattttcttccgcacccgcattctgtattattgaaggaatctgtagtgaaaaaaccaatttttctgtttcaggatcggccattttaactggttcggcaatttcacttttgtctttttttattttaccgatatcattataatattgattaattgaatttttcatatagctaggcaaggaatcttgagcatatgaaatggttgtgcagcaaagaaaaagaaatagtattttttttttcataacgacattgtttagagttaaggtaaaggctaaaatctgaaatctgaaattggtgttatagtttaatatagtggcattatacgctaattagagctgaactgtcaagtaaaaatgtatatgtttaatttcgtaaaacttagtaagtgaaaaacctgattattcttgcgaaaaaaagaataaacatttgcttttcagtagtttaaaaataagtgatattatgtatttacagacaagtagaaatactgtattttaatattttgacatgataattatttttatcctttaacggcttacattaaaaaaagaaagcagaaatgcagcatgttttttatgaatatctattgggaatcataaagcaccattttcagggtgttttttgtttggacttatattctttttttagagagtaaataaacgtttttttcttagagcgcaaaaagaatgtgaagagactgggtaattttgaatgaagataatatctaaattagagcacctgacttagcgagggtataacttcattgataaccgacaaagagtttctaaagggttatggtagtttagtgtcagagtgactccaagcggaaaaaccgaaggaacttcggtttttccgctttcaggctttttcctattttttatttttaattcttgagcggatttggtataaatttttcttgatgaggcttaaaatgattttatgatgttttgagggtttgtttttcaagcccctgcattgaagaatttccatatggttcagggaaatttcaatggtttctacggactgtccgtctactttggcagagagtataagagaatcttttctgctatagtattcattggtaaatacgcaatgtcctaaatcatcgccctcctgcatgaaatcccgaacgttttcaatcacggtgatactaagttcattctgcctgaacacaagcccgaagaaccgttttttgtcgctcgtgtatcgatcttgcgccttttcgatttcaagacgcagatcttgaagctttttctttctgcgcagttctctttttctgcataccaaaaggtcgtgcgcttcattaagactagtaggacagacatacagcgcactatttaagtctttttcgaaatactgcagtaattcgatataatcttcccaaatagtaatgtcacttattaaatagccgtttttgataaccgttttaactgcttgccaattgcgtttgatgttttggcgcgatgcgccgagataatactgcaaaagtgaaaattgtttggcttttaagagggtttcagcgatggaatcttttaaaagagcggtaaagagaatttgaggggcaatggaatgcaccgaagctttaaaaccgtttcttttcagaattggaagtacttttgcattgggatatactttgtagggattgatgcggtatttggcattatggctgaaatccttagggcgaatttcgagcgaagaatacaatttccaagcatcgcaggcatgtgcaaatacattgacactcattgagagcgtgcgcacttccccctcagggctgatccaatgttgcatgacctcgctgtgagagtaggttggcgcgcagttctttttcatgtgcttttgggagcagatgatgcggatcacctgaaatcctccataagtctgcaccacagcagagtattccaattctttgaaatatacatgattataagactgtattttaagttttgctttacaggcggtgcaggctgtaaatttagagcaggtatttgggtctgtgggtttccaaacgtgggcgcactccaaacaatagaatttggagcgtgataaaacgccccatttcaggaatatatttttttcagcccaaacgtgtactttgggctttattttgggcagagaagcgcttaaagcggtcagctgtttctcaaggttggttttgggtatcataggtcaaagagggttaaggcagtctgcacgggttttacattttgttttagaggagtaggaactgcagattgcacagggatggcagggatttcaggctgagagaacaggtctgctgattgtggttgttgaactattgctttgcaggcaataggagcaggtgtgccgatgctgtcgtcggtatagtattttacggccatgtcaaatatttcctgattgtcaaaagcgcagtgacctgtttttttgacctctgcgaaaatgtagtgcagacagctttcaaggtttttggctgtcttggcaaagtggggcgcaaaacgggcatcgttctgcgccaaagtattaagatacttttctatagcggatttgaattgttcagaagctttcataataagagatttaagattaaaaaaaattattcaaatactctagagtagagatcatagcagtattcttcgaaacaaagccagcacataaaagtgtaatgcgggctttggaaacggttcccgatcggctctccgatggcttcttccaattctgagcggatgctctccagatcatcgatatattcgatataaaaggctttgcagtcggcgtgataaatgaactcggaaatcatcccgctgatacagccacctttctgcaaatcaagcagaaaggctttgagttgtgctttaggtttttcattgtaagaacttatacttcagcggattatatcattaaaagtattgctgacacgatactgagagtacgcggattgtttaaaggctttcatgatgttttagttaggcgtgtaaaaaaattaaaggggtaaaaaagatttaaaaaggcaagtcatcgggattttcatccacagactgtttaggggcaggagtgggctttgcattttcgctccccacaaataccagtatcttaatatcagaggtatgaaaagtcagacccccaagggctttgccctcactgttctgatagacatttagaccaatgcgcccaaagagctgaacgagtgtaccttttttgagccattgtgccagtccagaactgagccaataagagcagcctatataggttactatttttttgacttcggtgcttcctttaggtttatagctgtcgtttattgctatagagaagtttactacttcgcggttttcttttactttgaaaactgtggcatcttttacaattcttcctgtgatttccatgacataaatttttaaatgaatactttgtttaaaatcctcttcccccgtaatccgcaacgcaaatttttcaaaagaaaaaacgggaaaaaagaaagcaaagaatcagtgtccggataccgagccggagtgctataagtcccgaagggcggccaggggccgttatgcgcatacaggagagggcgggcactactttggctgcccttttaatccgttttgaattggaaaacagttctcttttttttgtgtttttgagattccgcatgagaatagctatcttagcagtgaagaagaaaacaagaacaacaacagcagccccctaaaaacaatatgggacaagaccagtatatcagactctcacagctcaacgaccagatccaggacacgatcaattcccgctttaagggacagacgtactgggtagtggctgatatcactaatcattccttcaaggcagacaaaaagatccattactttgaactagtggaaaaatcagagacaagcagtgtgatcacagccaagatactgggtaagagttggggagccggagcactcaggattcttgattttgaaatcacaaccggacagcgcttcaccaacaacctgcatgtgctggtgcaggtgagtgtggactaccatccgctctacggactttcggtaaaccttctggatatcgacagtaattttatgctgggcattctcgagcaacagcgcaatgcgacgcttgcaagactggtaaaagaaaatgatttcatacataaagagggcgaggggtactccacgctgaacagccgtctgaagcttcctgtggtaatccaaaggattgcagtcatctcttcgagcagttctgccggaaatgaggatttcagacatacgatgcagcataacgattttggatatgttttccagatcgatgactaccatactgttgtccagggcgacaataatgccaagctgttcctcagcaagcttattgaggtctacaatacggggattccttatgatgtcgttgtcattacaaggggaggcgggtcacagtctgacttcctgatttttgacaattacaatatcggaagggctgtcgccaaattccctatcccagtgataacgggaatcggccaccagaaaaacgtaagcattactgatcttatggcgcatacccacacgaaaaccccgaccaaggcggcggagttcatcatagcgcacaaccgcagttttgagcagcatatacttgatctgcaaaggagaatagccatcaaatcacagcagctttttctgagacattacaaagaactcaatgagcttaaaagcctggttacccataatgtaagggaattgatttccatgcagaaagaagatctgattttgaaaaagcagcatatttcccaagaaagccgaaacatactggcaaaagaaaagcaaaatctactgctcaccgcccaaaaaacgtttcagcggccgcagagcatcatccagcagcaaaacagcgagctgcagcatttaaaagcaaacctgaaaatctttaccaatcaatatctgcgcagccgcaaacttgaattggaggactaccagaaaactataaaactgctgtccccgcagcatgtgctgagcagaggatatgccgtgatacgcaaaaacaacaaaattgtaaacggagcagagaacatcaaagaaggagaggaaatagaaatactattaaaaaataccgtactgaaaagtacggtcaatgaaataaaacaatacgatggaaaagacactcacttatgaggctgcagccaaagagcttgccttaattgcaaaagaaatggaagacgaaaccatctctgtggatgagcttgcggcaaaagtaaaaagagcatccgaactcattgagttctgtcagacaaaacttaaatccactgaagcagaagtagctaagatcatcagcggaatggagaattcaaagggataaaatcagtgcaagtatacaaaaattgcgtatttgttctgtgatcgtatacagtttcgaatctaaatttgagaagtcttgattttgctggaattctgttttagagaatgtaaagtgctacgattttgccactaaacttgaattagtggcttttgtaattatttgcctcccttttggttccgcgttaaaacgccgcccccccctgtgtttacgggggggcgtttcagcggagaaaaccacttttgtaatgaatgtgattaaaaatacacataaagttatttaattaaggatgaaaaagagataaaccaatctttcgaaatgaatcaatttttaacttctgttgaccagcgggtaaataatcttagaaataaatcaactgtaagctatagtagtacaacaattatgaccagggacattgtgcttctatcggaaaatcgcctttcacctgcaggcaaaaaaagactttgattttcggtgatgtttaaattccagtagccaaaataggacggatttatttatagatacgagataaaagattatttttatcaatccttaatgtacatttatttaacaactaatgattagagattcacacgaactaacaattgaattttttgacgttgatggcggagacgcgatgaggatcagatatcttgggaacgataatctttggcacaacattttgatagacggcggttatatccaaagttatgatctcgtttttaagtccataataaattccatttctgaagcaggcgaatttatcgatttatgggtaatcacccatattgatctggatcatattggagcaataattggtttcgtaagggacggttcaattaaagataaggaaaaactggtaaaatcattctggtttaatcatgctgtatttaaaatatcagatttaggaggcaggattggttacaaacaaggtattgccctgcggacttatcttgaagaaattaataaacttgcaattgaacagattaccgacagtacagggttaaaagatttctacggtctgcaattttccatcctttcgccaagtaatgagaagatcgaagcggcagataatgactggctgcaaaaagaaaaaaaaagcatggcaaaaatgtccacttccaagggggaccattacttgaaaatagaagactttgataatcatcagtttgtggaaaatactaatattgccaatggcagctcaattacttttctagtaaaaatcaaaggtatcagcggcctgtttttagcggacagccatccgtcggatatagttaagtcactcaaaagattaaattatagtgaaaaatatccattggaaaccaattttgtaaaagtttcacatcacggaagtaaaaataataccagcccagaactgctaaagctcatatctgcaccgttatttgtttttacggcaaacggtataagcaataagcatcccgataaggaaacgctggtcagaattttaaaaaatcattcggcagaccgtccgccggtggaatttcgatttgtgtctaataccgccgaaatcatgagaatttttaatgtggatgaggatgctgagcagcgctacaattttattcaaagttttatggcgaaagataaaatacaaacagatttaaaatttttaccatgctgataaataatgataagctgttccagtacggtacagtaaaaatttcttgtaacgaagaagttggcaccgcgttgttatattcaccaggggattcgctcgattatatttatattttgactgtaaaacactgtcttacaggtaaatattttgatagggagtttagaaatattgatataaagattgaaaatatatttaaccctgttacaggcgagtttcatagctgcaatttagaggaaactgatatagtaatatgtaccgaaagcaatgagcttgatcttgctttgataataatgccaaagcataaacttgaagctctttcaggaattaattattttttccagataaccgataagcccggtataagtggcgaatgttttataagaggatttgctgattttaatagtggagaggtcgacagaccctataatttaaaattttctgaatatgtgaaagataagccgaaaataataagcttaaattttgatggaaaactcgatactcgttaccaatcggctatagaaaatgttcagggactttcgggaagcggtgtttttgcagtgattaatggtaatctttttttaatggggctggcgcatgcatatgaagaaaaaaacagattttttgcaacgctgatcagtacatataattatttaattccttctggctacgagaaatttattgcagttgatcaggaagaagaccaatccgttatagatacatttagtgctatagagataaataagagttcaattaaagcaagggcacgcgatactgtcggggggattcacattgaacgtgagataagcgaggcaaaaaaaatgctcgagaaaaatagaatgcttgtttttcatgggaaggctgggacaggtaaatcagctttagcaaaaaaactgattatggattatgaaaaaagtcctgaaacgtcggttattacttttaattcagaacagcttttttctgctactttaaatgaagcactaattaaagctggctacacttccactgttaataaggtcatagagagtccgctttcaaaaaaaagaatctttttttgggtcgaaagttttgaaaaacttgccgaagctggttttgggggagcttttacagaactgcttctattggttaaaattaatcctcgcttatctcttatagtcacaataagagataattttcttcagaaattcaagattttttatcacagtgaacttgtttctttagaaatatttttatatattgatgagtttagtgattcggaaatgaaggaaataatgatgcagattccagagatggaacctctatttagtaacccgaaacttgtgcatttactgaaaacgcccttttatttggataaggcatttagaatctatcctcagcttctaagagtggagaatcttgatgaactgcattttaaaaagcttatgtgggaagagattgtagaagcgggaaacaggcagagagaagctgtttttagaaagattgctttacagcgggcaatgtctatggagctttatacttattatgaagcagatgcagtaactgacagtttggttggggacaatatactgcaggttgagcaaggtgaattatcaaaccgtttttcaccttctcatgatatattagaagactgggctttaatacgatacattaaacagaaaaagcaagattcggcttcgtctcatgattttattaaaaacttggatgaaggtccggctgtgaggcgggcatttagactctggctggaagaattttataaaactgattatgcagatgcggaaaatttctgcagtgaattaatgttaaatcctgctgttgaagcttcatggaaggatgaacttttagtttacatactgcgttccaataatgcctatttcttatttacttctttaagggagcatcttattgagaatgaaggtgttctgctattgagggttatccatctgctgagaacatgctgcaaggagcttaaaggtactaccaatgattttaatgatcttgttcctgtaggatctggctgggacactcttattgattttgttcaagaaaacaggtctttgacgcttgatattccagatatcgaagatcagatgttggatgtaattttcgattggagtaggcagctaccagattttaattccaaaattttgcctgcttcttccaaaaatgcagctatgttccttttagattatactatcaagaatcaatcaaattttacgggttatagaagaaactttaatttatcgaatcaccttaatcagagtctcaaactcattcttaagcttactcctgtaattcagctggagattaagaacctattagatgcagtactggatctgccattgcttaataatgatatatggaataataagaatgtcttggtttacgtcagaaattttatagttgatggaattactggcgaacaggtatgtaaatatttcccagatgaagtgatgaagatggcttcggatcgatggttagaggaacctaaagtctactctaaaaacagtttaatggggcaaattgtaccagtttatgaatctaactactgggggctgaaagatatttttgagtatgagtctgccagcgcttttcaaacttttttttattggatgtttctttaccaccccgaaaatgcagttgcttatatatgcgaatttctgaatacggcttttgaccagaatcaaaaacatgccggtgcaaagggcagatcttctgatgtagcactggattatgaagatttcggaagaaaactgtactatggaagttatgaatactgggttctctacagaggacacagcgcttacaatcaaatcatacaatcgttgttaatggcgctggaaaaagggcttttagactcatcagaaaaaagagaacaatcgactataaagttgcaggaactgctggctgctttaatgattaaatcaaataatgcagcggtgcttggagtggtagcaagtgtggttcaggcttatccttatcttttggacgaaaccacgattgtccttttaggttcaaaaactattttgaactgggacagcaccagatacaccagagaccttatgtcagatcactattacggaacaaatccttttttaagaaaagagagaaatcaatcacaaaaacttaaacatcgtactgctcattttagaggccttatcgggtttacttctcattatatgttctcgtatcagaccatgaacaatgaactttttaaactcattgataagatgtgggcagattcttctgaaacagatcatttttggaggaaggcattatcggagatggacttaagaaaatatacttttgagccggtagctattgacggttataataatcattttgttttaagtccaggttatgagcagggtgtttcagaggtgataaattcatttaaaaatgaaaaactaccacgtgccggagtagtatgggcatcggaggtttttgatggtaaaaccgtagaagacaactcttatgaagtctggaagagcggctacgaagatttgcaaaattctgatatcgagttttcatttatgatgtcccccggaaagatggcctgtctgggactgcgagattattttgaaatgctgcaagaaagcgaaaaattttggtgcagggacgaaatattgaaaaacgcaggcagctatttagaaaagccgtctggttattcgggagatatgactgacgcatttctagataggaatgctgtcctttttggagttcctctgctgtttaaactgccggcggaagccataaatgaaactaagttacgagatcttgtttttaggctagttattgcacctctagagagggataagaaaaaatttctgcagtacagtatagtggaaaaccttttgaaaaacaggcttggatttgcaaaaaattgttggaacggactgctcgcttacattcaatataaaacaattgaaaaccgtagacggaaaaatgatcgtctatcaggtatttattcttgcaaccatgcctctgaggttgcggctgagaaagaatttattgatgacttaacagctgagatcattttagacaccccatttcagagtaactgtgagtttgcaatagatcacactacatgctggtttttagatgacgccttactgatgattgcaactagcactgaagataatgtagaaaagagctttattgacagtttcttgaaaatgcatttagattatttgagcagtttaaaagctcatgatcacaatgaattttttcaaagcctccatgttttaaagtctttctatgcaaaatatctgctgaaccgttctaattcagaagcagaaaaactgtttacggatctactcaacttatctctggaaaatgataatcaaaaaaatcttattgagactgtaagttttgttaatgatcttctgaagcagattattgctgaagttgacggatggcatcccgcttcacagccaataacagaattttggtttctttggcaggtattaaaagattggatattaagtacaaagcgagccttttttatacctgttttattattggatataagatggaaagataccgctgataattggagagtcttagaaaagaagagttttttttacagagattttataccggagtacggacataatgccataaatcaatgtattgatcttgtttcgggtatcggatttaaaaattttatgccacattcggttttatggcttgctgatcttcttaaatatccgactgtccatattattaaaagcgataagctggagagatatgttgacaggtcattttttaattatggagctaaaattaagtcgagtaaagaactgacaggagcttttgtttttatattggactttttgatagaaagaggggctcccaaagcctatatgctcaaggaagaaatgattcagtacaagtaaaagaatcagggccttttaatattaatcagatttaggctgatttctgcatttttttcttttaatattacattacgaatcattttatcgatgcgaaaaatcaatctcaatagcaaaacgtgtatttaccttgatcagtttgctgtaaaataagccaaattctgacatctgttgaaaaacaagtataattgagaagtaaattgtgtttaatgtgctgtaaactaaggttctaatatctcgagtttactgggatattttttgtaaagatgcactgcgtcacaattctgccacaaaaccaaaacttacgtaatgtctttaaagcttggctcttttcttgtttttggatgttatttacttataaatacaggctttgcacagttgggagttgatagttaattgcagataagggctagtgaattagatagttactctgaaaaaaataaagaataattgaaaaaaaataaaaaaaaggtataaattcgcataaggtttttggcgcgcctgctcgtttgtgcaaagattttatcagccaggagacagataatataaccttcagagcttattatccgacaacagtatacaaacgcaaatcccagggtaataatctttgaaacaataaggattatattatggaatctattgaatttttcaaactgcaagcaaaaaatctatttagagattttaagacccaacaaaaactttctggagagaagaccagagaatttaactacgagtattcgccaaaacattttcatatctatgatgtgatttatgattatggcatcgatgaggaaaaatttactctgatgaatgcccagcacgtcattgccaagatagcaggctttgacaaatggggtgatctggcaaaagcttcgttttctgaattggagcttgcaaaattattgttcgagcatcaagataagattgatatcctttcttggaatttctatatcgccgatgcgcaagagatgaatgagcagctgctggacgctgaggtacaggtcggaatattcgagcaggtcgttgttgaagagaatatttttgacatggtagtccagagctatctgctgaagcacgacctgtaaagatcaatcacagaaaaacgcggttaaaaaaagcagcccagaatttagcgggtaggggctaagttttgcctgcgcgggaaatctgcattgcaatcctatctaaaacctcaggctgcaatcaaacttagggttgtcctgcaattccttaaagtgtctgcgccgtaaaaaaaaagccggcattatgccggctttaaaattttcagatgattgtgctgttctttatgcacttctttatctgatgaagatttctattcataatagccaaaatctgcctatgatgttttgacgcattgttttttagtcccctgcactggatgatttccaatttttaaggttactgttaaaagcttcttttctaacttatcaaaatcggataaatcgtatgtggagacccagaaagttttacatgaaataaagcaaaaattaattttggaaaaatccgatacaaggttgtttaacattaacctgcttattgataattcaacaaatagctatattaattcaaaatctgttcctttatcattcagtgaagcatttgataaagtagaagctatagtactatagtgaaaaattaaaagctgtaattttattggatagataatcggtcggttcttaaactattttaaagatagttaagagaaggttctcaaacgcaatgggtaaatattgtttataattttacccagttgcttttgctttctgcaggcagtatttcttaagttttttgatccaagttttatttagcggacatcaaagtgaaaatgataaattcttgccactcgattttattcaataatggcaataatcttttttaatatctctcttacagcttcttctctgatatcatttctttttggctttttaatctgaattttaaattgattcagacgtttagctgactcttcccgtttgtaataaattacgatgtacacatcaccgacttctcctgtaattgggtaatcaattgtacctggagatgcaattcctgtcacggctacatacaaatcggcgctggggtaaacttttattaagccataagccatttcaacagtggtctccattgattcagctgagtaaagatcgattgttgcaggatttaccttgagaataccggattttaattctctgtcgtaagtaactacactccctttcaaaatgctagaagcaccagaaacagaggctatggaacttgcaagaagtcctgccgtaatactttcagcacagacaatagttagttttttatctttcaattttatgttaaatgctaatatttcttcttctgtcattgctattattttttttctgtgtaaaatttatgtatgcatcctaatccttccctaactataatgcaatcggttttgtagttgtttttattataaggacaaacttcaaccccaatgtgagaaacaaaatgaaattcgatccggttttctagatggtcgttttcattgtcaaaaaattgatcttcttcatatttgttgagtaaatcgcatacatcaggttttgaatcatcaatttttccagtgtaaaatagcgaaacaacaaatattttttcaactggaaggaaaaatttatatgtttcgtcctctctccgctttttatgaatcagttttcttatagttctgccatcatgaacgacatccgttatgattaaaattgatttaaattctcccgagttgttaaagttcagctgtttttcaaagctggaatgatcgtcatatcgatatgagtacggaagaaaactatatggtttagaactcagaactgctgttcttgtagcaagcatattcccttcaactcccagacctattacaaaatcaaattctattgatgaatctgttatagtttcataaatatattttttacatttattcaggcggtttcgatccactagtaattttgaaacatcaatccatccgtgtgctcttgaggtttcactccaatggaaatgccctgaatggaaaagattatgttccttaacaatttttaataaattaagatgttttacactgttattatcaaatggtctgtactgcgcatttttttctggtataatttcttcagtattttcatcagatggaattatttcaggtaaaaaatcagagaatggaatagttgtctgacttggaggaattttaagttcaatctgattaacctctccacatgattcacttatatcccagacgccatagtctggctgaccagttattttattatttgttgttctgtaatatttgttctctagaattacttgagaatcttggtctttaagaattaaaagattaaaattcggatcaggatctttacatccaaaagaacctatgcttatgttaggaattctagttttaatttcagaatatggagtatgttcattaccaaaaatataacaatctaccttatgaatttccagtatcctttgttttgatgactgatagttcatatgccgtcttctattatgggctatttatgcaaaactttttaagactcattttttttctaaaggtttgtgtactgttcttttgttttctcctaattatatgtcattactttgtactattatagtcaaattttttaacgtccttttatttcgtacttgacgtttttggctgtctagaatttcaagacttgcttaaacatgctgtctttgtttttagtgatttttttaaattcttgtgaaatttctccgtcctagttaatcatttcatcttttgtacaggataaaaaaatgagagatgagatcaagaacggctttgcaaatgatttgatatggatttcgtttctcatagtgaagtagttatattttaatgtgtttttttctttatattaaagttaaactgctttgggggaaatcctcagccgaaaatcggttatttaaaatctgtttttaaataattgtaaagtaattcttatatttacgcacaagaaaagtattaatgatgaataagactgtaggggaaaaattaaagatgctgcgtaaagcgaaaaatatgtcacaagaagaagtagcagacagtcttcatatatcaccatcggcttatgcaagaatggaacgtggagaaagtacttcctgggcagttcattttaaaaggatttgcgaggtttttgaaatagcaccggaagaattagtccgagaagagataggggttaaaacttatgagagtttgatgaatattgatcaattgatagactattctatgcttggtgtttatcgaaagattatcagaaaatacgaattagagattgaagatcttaaaagtataattaaacatttgaataaagaacaggaataaaaaaagcttcaccaataaagtgaagcttttttagtatgggaattatataattaacgtgtaatacagatttagttgatctctttagtaacaatttgcatggtctcgcggctcacttgttttagtaaaacggttttgttttcctctaccgtttgtgccgcttgttctgtaaaatggcgaatcgtgtataaagtcacattctcgctaaattctactttgaattttttcgaaagaatggcgttcaggtcattaaaattcccaaatttatcttccacacaaaccgaaaaactaatggcagaattctgaatcagatttacttttattttaaattggtgaaacaaagcaaaaatctcgctgatattctcttccataataaaagaaaaatcaatcgaagaaagagaaattaaaagctgttctctttttacgataaaacaaggatattgcggctccaaatcgacacctttagaaacacaagtcccttttaaaagtggattaacaaaagattttacgtacagcggaatttcctttttctgtaaaggctgcaatgtttttgggtgaattacagtagctccgtagaaagccagctcgatcgcttcacgataagaaatctggtttaataaactcgcattttcaaaataacgcggatcggcattcataactcccggaacgtctttccaaattgtaacactttctgcattcaggcagtaggcaaaaattccggcagtatagtcagaaccctcacggcctaaagtagtagtaaagttattctcatcggcgcctaagaatccctgagtaatgtttaaaaccttacgaggaacatttttactgatattttgttgggtaacctcccaatctacttctgcatcgcggtagttggcattggttttgatgaaatttcgaacatcaagccattgtgtttgaatgcccataaaattcataaaatgacttaagatagtcgttgatatcaattctccgaagctcacaatctgatcgtaaacaaaattatagtttggagatttattgtgcgccaggaaatattccaattcagagaataatgcttttacagcagtaaaaacagcatgttcttcgttctcaaacaaatccagtagaatttgattgtggtatttctttatttcctgtacggatgaactcagttcggatgatttatcaaaataatttttgattactacttcaagagcatttgtcgtttttcccattgcggaaactactaaaatcacatcttcataacctactttttgtaaaacgtcgtatacgtttttaattccttcggcatctttaaccgatgctccaccaaatttaaatactctcatttttaattttagattttttatttcagatttcagaccggatgaaatcttgtacatgttattattttttctgtcatgaatctatactaattggtaaaattcgtggcaaaatattgttttttataatttttctaaaaacgaattaattcccgtttcgtccatttgaacaactctccagtcttcaaggatttttgcacccgaattctcgtagaattttacagcaggagtattccagtccaaaacattccaatcgattcggagaacattatcccgctttccctgttttatgatttcggcataaagtgcagatcctagacctgtacctctcatcttctctttaacgaccaaatcttcaagatgtattgtttttcctttccaggtggagtatcggtaatagtagaacgcgattccaacaatttctttatgattttcgtcagtatcaatttcagcaacaaacacatgaaacagtggtttttcaccaaaaccgtcacgtattaaatctgcttctgtaatcactacagcatttggttctttttcgaatattgccaactcctgtattaatcccagaaccgatttcatgtcttcaggattcccttttctaatattcatatattcttattattaagcgtttattggctaaaaaagtattcttttgctcagtactttagggctttatttagcaaatatacaatagtggcaaactaacgaaataatttttaaaccattctcacaaaaaaaacgatatttgtgacttaaaaacaaaattacaacgatttagtaatggaagaacgcaataaaacactgggagagtttattattgagaaccaaaaagcatttcaatattcgtcgggggagctttcccgaattatcaattctatacgtttggcggccaaggtcgtaaactataaagtaaacaaagctggattggtggatatcattggcgctgcaggcgagcagaatatccagggtgaagaccagcaaaaattagatgtatatgcaaacgaagtatttattcagacgttaattaaccgtgagattgtctgtggtattgcttcagaagaaaacgacgattttattactgttcaggggagcgacaacagtcataataataagtacgtgatcttaatggatccgctggacggatcttcgaatatcgatgtgaatgtatcagtgggaaccattttttcggttttcagaagaattacacctatcggaactccggttacaagcgaggattttttacaaccgggagtcaatcaggtagcagcaggatatgttatttacggaacatcgaccatgttggtatacacaacaggtcatggtgtaaacggatttaccttaaaccctgctattggaacattctatctttcacatcctaatatgaaatttccacaaaatggaaatatttattcagtcaatgaaggaaattatgttcactttccacaaggagtaaaaaattatatcaaatattgtcagagagaagaagaagacagaccttacacttcaagatatattggaagtttagtttctgattttcaccgaaatatgatcaaaggaggaatttatatttatccaaccagttcaaaagcaccaaaagggaagctgcgtttgttgtacgaatgtaatcctatggcttttattgcagaacaggcaggaggaaaagcaacagatggttttggaagaattatggaaataaagccaactgaattgcaccaaagagttccatttttctgcggaagttacaacatggtcgaaaaagcagaagaatttatggcggaagcgctttagtttttagtcacagtcacagtttttagtcgcagtttaagctggactagaaacagcaaacccgacagttttagagtgcactctaaaactgtcgggtttattttttatttagttttagctatagtctgaaaactgaaaactgcgactgaatactatttatgcatgtgttgcatttcgtaaacaaaagtatcaccgtctacttttttgtcgactaatgataatgctttagaaataatatagtttacgttgcttggtgtaaaacctaaagcgatacctaattttcgtaacatcacttcttgttggtcttcaagatggtgatctacgtgtaccattcttgttaagtcatacaaacgctctaaacgctgtacgtgcaaataaggaggattgatagggtattttaatgggtcgttaagaatttcttcgtattcagtttctgaaatttctaaacgtgcagccaatttgtccaagaaatttttttcttcaggatgtacaattccatcagctagtgctacacgaacaatagcagaaaagtgacctttgtttctttgtttgaattcgctatcaaataaatctgaaaatgacataattatggttttttttatcctacaaagataatttttattttaaattattaattttaaagttctcataaaatttaacttaatttttatcggttgttttactttgggacagctgtaattgttcaaaataaatcgtaagtttacaacccctaatcattataatagagtacccttatgtcagaattttggatttattttcaaataggattaaagcatgttttagatattaacgcttatgatcacgttctttttttaatagcattaacaaccccttatttgtttaaagactggaaacgtattttgcttctcgtttctgtttttacaattggtcatacactggctttattgctttctgtttacggaattattgcgataaaagtgaatactgttgagtttttaattcccataacgattttaattactgcagtttttaatctctttacagccggaaagaactctaaaaatgatggtttgaatgtagtgttttttgtgaccttattttttggaattatacacggacttggattctcgaattatttcaaaactattttaggagggtcacctggttcaaaattactacctttaggagaatttgctttaggaattgaagcagcacaactggtagtggtttttgtagttttgatactatcttatattgtgcagaccatatttcgtttttcaaaacgcgattgggcacttgtaatgtcggcttttgttatcggagtggttattcccatgattattgaaagcccaatttggaacagataaaataaatgaagaaaaaaaaattaaataaatacgacaaagcttatctgaggattgccaaagaatggagtttattgtcgtattgcaaacgaaagcaggtaggtgctattattgtaaaagaccggatgatcatttcggatggatacaatggtaccccgtctggtttcgaaaattgctgtgaagatgaggaaggattaacccgttgggacgttcttcatgccgaggcaaatgccattttgaaagtagcaagatcaacgcaatcctgtgaaggagcgactctgtatattacactttcaccttgcaaagaatgcagtaaattaatacatcagtcgggtataaaaagagtggtgtatcatgacggatatcgtgacgattccggaatacagtttttaataaaagcgggtgtcgaagtcgaacatattcctgttttagaagagtaaatgaaatttaattcaaaatatttaccacttgttatcggagcaactttagctctgggtatcgttctcggaagccttatgaatgctcccgcagatgatcagcttttggctaaaaattactcaaaaaccaaactgaacaagctgatcgattttatcaataatgaatatgtcgacagtatcaacaccgattcaattgtaaatcttacagtcgataatatcttatcaaaattagatccgcattccgtttatatccccccaacagaacaggccgaagtagccgaaagtatgaaaggggattttgtagggattgggattaatttttacatgtataaagattctgttgccattataaaaccaattgaaaatgggccttcagcaaaagccggaataaagtccggggatcgtattctatttgccggaaaaaccaaattgttcggacgcagactgtcttcagatattttgttttctaagttaaaaggattaaaaggatctgagattgaactgactgtttttagaaggtcagaacagaagaaacttaagtttaaagtaaaaagagatattatcccgatcaaaagcgtcgatgcttcactgctgctggggaataatgccggatatatcaaaatcaatcgttttgccgaaactacttttaatgagtttaagagtggtctggagagattgaagcaaaaaggaatcgagtcgctggtgattgatcttcgtgacaatggcggtggttatatggaagaagccagcgcaattgcagatgaatttttaaaagacaaacagctgatcgtttttactaaaaataaaaacggtactaccgagaaaacttatgctaccaaagcaggcagttttgaaaccggtaaagtgtatgtgctgattaatgaaaatagtgcatcggccagtgaaattctggcaggagcattacaggataatgaccgtgcgatcattgtaggtcgacgttctttcggaaaaggtctggtgcagcgtgaaatggatttcaacgacggatcggcagtgagactgaccgtggctcgttattacaccccaaccggaagatcgattcagaagccttataaaaaaggaaatgaagactattttaaggaatctgaggcccgtataaaatcaggtgaactttatgcaaaagacagtataaaagtagctgattctttaaagtttaaaacaccaaaaggtaaaattgtatatggcggtggcggaattgttcctgatgttttcgtgccaatggaggcggagcatggaaatgaaaatgtggcctacctgatgcaaaccggaattgtagggcatttcgtttttgaagaattggataaaaatagagctgtatttgccggacttcattttaatgagtttttagcaaagatgaagagttctgatctgtattttaaaaagttcaaaacctatgtgctgtcagctggtttagatttaaaatttgacaaaaccaaagcattggtaaatcgatatatcactgctgagtttgccagacaattgtatggcgaattgtattattacgatgttattttaaaagaagatgccatgatcaaggctgttttgaaaccaaacaagtaatccctaatcttcatcagatgaaaatagaaactattgtaaatgctgagattgaactattaacggccatgaaaagtgcagatgttccaactttggaaaagatgctgcacgacgatttactttttaatttaccggacggacaaactattacgaaagagtttgatttaaattcgtatcgttcaggtaagatgcaaatagatgcattagaagcttcggatcagattataaacgtaattggtgactcggctgtggttgcggtgacgattttattaaagggaagctttaatcataatccctttaatggaactttcaggtatatcagggtttggaaacagtttgatgaaaatctgaaagtaattgccggcagctgtattcaattgcagtaaaaaagatctaagctggattttgttaatctgagtgcttttgtgctaacttttccggggttttatcgaatactgtcgtgtgcatgagtctgcacgccattgttccataaagttaagatgtcagtcgctacggcagcaccacttccggctgcaatcgctaattgacttctccagcctgccagagttcctgtaacgtaaatgccgtcagcaaccttgtggtcgtcgtttttaagctggatgcgttgtttttctggaagtgcttttttgtgtggctcgatgtattgcatcaaaccttctatgtcaaaagtatttgctgaaccaataccgatcacgatactttttgttttataggagtttttgttggtagttacaaggaagtccggatatgagccttcaactttaactaccttttcgttttctatctgagtgatatgaggataagttttggctaaatcctgagtgctttctactaacaaatcagatcccagtttgccaggtgtaatgccataagcattgaaaaaaatggcttcctgtagagaagagtttttttgatgtgtaaaaattccaattttcttatcggttacaaaagctttgtttttggctgatcccaatacaagagcgcaggacatgcctgaaacacctcctccaataattaaaacatcaaacataggattatcgtccgtttgttttttcttcaattcttttagagattctgaaaatcaaaagaattaaaacggcgcaaaatgaagcagcgattccaataaaagcaactacactgtctccttgaaaaggatttttgaagtccagtagcgtaatattaaaaacgattaatgccagggctaaaagcactaaaatggaagtgaaaattttcataatggttgtttgtttgtctaaaataataaagtagaaccgtcagatgtgaaaagtatcttaaagttatattttagaaattttatggggtaaatttataaaaataaatgttagacaaacaaacctttaacattagcagcaaataatttaacagcaattgctaaaaggattactccaaaggtcttgcgaactacgccaagtccgttttctcctaataaattttctatttttttagatgatttcaaaacaacgtaaaccaaaataatattcagtaaaatggcaataatgatgttaattgtgtgaaactgagagcgtaatgacaataaagttgtcatggtaccggcacctgcaattaaggggaaggccaaagggacaatcgaagctgatcctggttcttcatcacgataaattcggattcctaaaatcatttctaaagccagaaagaataatacaaatgaacctgcaacagcaaaagaatgtacgtcaattccaataagatgcagaaagccttctccgacaaaaagaaaagtaatcataatcagaccggctacaatcgaagctttctctgattctatatggccgactttcgctcttaaatttaatataatcggaatcgatccgacaatatcgattacggcaaaaagtaccattccaacggtgataatttccttaaaatcaatttctaacataatttttttatttactgtttagagatgtgcaaaagtagataataaagttaatgcttttttgtgatatagtcaaagcactgtatttttgttataaaaacacgtgttgttgcttaaaaaaatgatttttataacaattactgcgttgttttgcatatttgcaaggcgtttgccgaaaaatgttgcggcggttttttgtgcaagaccggcataaagtgttttgcatgacaatctgttgggtaagcatgagaaaagaataggcagaatatctgctttctttgcgtatctttgcactttataaattacagtatttcaatatcatgtttcaattagggaaaaccattatttcagaagatattcttgaaaaagaatttgtgtgcaacttgtcagcttgtaaaggagcttgctgtgttgatggagatgccggtgcgcctttgagtgaagctgagactaaaattctggaagaaatctatcctaaagtaaaacctttcttgcgaaaagaggggattgctgccatcgaagctcagggtacctgggtaaaaggaacggatggtgatcttgaaacgactctgattgataataaagactgtgcctatgttatttttgatggcaagaccgcactttgcggaatcgagcaggcgtacaatcagggaatcgtagactggaaaaaacctgtttcctgtcatttatatccaatccgggtgaaagactttacagagtttgctgctgtaaactatgacaagtgggacatttgcgacgatgcctgttcgttaggtaaggagttggaagttccagtgtataaatttgttaaagaagcattaattcgccgctttggacaggactggtatttggagcttgaaaaagttgcggaagaactcaaaaaatcgtaaaaaatcggcagccattactgttgctggggagtgctcagattttgattaaaaaagcatttgagaagtcaggtaaaaacttttaaaaacatttgaaattttcttgctttttgtttcaaaaattctatattttacttccaaaaatgagatgaaatttaatattaatttgcttgttttcagtattttagttattgtatgaaaaatatctcattttcgacgtgttgttaaaaactacgtccgattgtgaataagtttggcttttattttaggcaacaaatgacaatctttgtagtctactgaatgagttaaaatttagtataaaaattaaagaaaaatttcatgttacaagtcgagccaatattacaagaaaacaaaaatcgtttcgttattttcccaataaaacaccatgatatttgggaatggtacaagaagatggaggctagtttctggactgccgaagaaatcgatttgcaccaagacttgactgactggaataataaattaagtgacgacgaaagatacttcatcaagcacattttagctttttttgcagcttctgacggaattgtaaatgaaaaccttgcagagaactttgtaaatgaagttcaatatgccgaagctaaatttttctatggttttcaaattatgatggagaatattcatagtgagacgtattctttattaattgatacctatgtgaaagatgaagcagagaaagcagaattgtttaatgctttagaagtttttcctgcaattggtaaaaaagcagaatgggctttaaaatggatcgaatcggattcgtttgctgaaagactaattgcttttgcagcggtggaggggatctttttctcaggcgctttctgttctatttattggttgaaaaaacgtggtttaatgccaggtttaactttttcgaatgaattgatttcacgtgacgaaggtgtacactgtgattttgcagtgcacttacacaatcatcacctggttaataaagtgccaaaagacagaattaaagaaatcatcgttgatgctttaaatatcgaaagagagtttgtaacagaatctcttccggtaagtttaataggaatgaatgcaactttaatgacgcaatatttagagtttgttgcggatagattattagtagaattaggttgcgagcgtgtgtatggatcagcgaatccgtttgacttcatggacatgatttctcttcagggaaaaactaatttctttgaaaaacgtgttgcggagtatcaaaaatcaggtgtgatgaacacagacagtgatgctcagaaaatttcatttgatgcagatttttagccaacagcaataaatttagtgtattccaagacgctaaaaaagtaaatcattttataagattgaatcttcatcccaaatcgttgattcaagtacaatttttaatgcctttcagtttgttttttcaaactggaaacagacaactattgagaatcctgcaattctcaaaaaataatttaaaaacacacaatgtttaagccttggaaatcgttattcccgagactttcattttttcaataactaaaaaagtaagcttatgtatgtagtaaaaagagatggccataaagagccggtaatgtttgataagattacagaaagaatcaaaaaattgtgttacggtttaaatgaacttgtagatcctgttaaggtagcgatgagggttattgaaggattgtatgatggggtttcgacttctgaattggataatcttgcagcagaaacagcggcttctatgactattgcgcatcctgattatgcacaattggcggcacgtgtggcaatttcaaatctacattccaataccaagaaatcgttctccgaaacgatgaaggatatgtacaattacgtaaatccaagaaacggacaagaggctccgttactttcggatgaagtatttgaagtaattcaggaaaactctgctttcttagattctcatatcatttacacaagagactttaattacgattactttggttttaaaaccttagagcgttcttatctgttaaaaataaacggtaaaatcgtcgaaagaccgcagcatatgttaatgcgtgtttcggtgggtattcaccttgacgatttgaaatcagtaattgaaacctacgacttaatgtctaaaaagttctttacgcatgcaacaccaacgttgttcaatgcgggaactccaaaaccacaaatgtcttcttgtttcctattggccatgcaggacgatagtattgatggtatttatgatactttaaaacaaactgctaaaatctcacaatcggcgggaggaattggactttctattcataacgttcgtgcgacgggatcgtacattcgtggtacaaacggaacttcaaacggaattgttccgatgttgagagttttcaacgatactgctcgttatgtagaccaaggtggcggaaaacgtaaaggaagttttgccatttacatcgaaacctggcatgctgatatctttgatttcttagatttaaagaaaaatacaggaaaagaagaaatgcgtgcgagagatttatttttcgcaatgtggacttcagatttattcatgaaacgtgtacaggaagatactacctggactttaatgtgtcctaatgagtgtcctgggctgtacgatgtgtatggagaagaatttgaagcattgtataccgattatgaatttagaggaaaaggtagaaaaacgattcgtgcacgtgaattatgggagaaaatcctcgaatcacaaatcgaaacaggaacaccatatatgttgtacaaagatgcagcaaaccgtaaatcaaatcacaagaatttaggaaccattcgttcgtctaacttgtgtacggagattatggagtacacttctaaagatgaaattgcagtttgtaacctggcttctatttcattaccaatgtttattgataacggaaaattcgatcacgaagcactttacaatgttacgaaacgtgtaactcgtaacctaaacaaggtaatcgacagaaactattacccggttaaagaagcagaaaactcaaacatgcgtcaccgcccagtaggattaggagtgcaaggtttagccgatgctttcatcatgttgcgtatgccttttacaagtgatcaggctaaagcattaaaccaggaaattttcgaaactttatactttgcagctgtaaccgcttctatggaaatggcaaaagaagaaggtccgtattcaactttcgcaggttctccaatgtcacagggagaattccaatacaatatgtggggattgaaagacgaagaattatcaggtcgctgggactgggcatccttaagaaaagaagtaatggaacatggagttcgtaactcattattggttgcgccaatgccaactgcttcgacttcgcagattcttggaaacaatgaagctttcgaaccgtatacctcaaacatttacacacgtcgcgtattgtctggagaattcatcgtagtaaacaaacatttacttcatgatttagtagacagaggtttgtggaacgaagatttgaaacaagaaattatgcgtcataacggatctgttcaaaacattgatattgtaccacaagatttaaaagatctttataaaacagtttgggaaatgtcgatgaaagatattatcgatatgtcacgtcaaagaggttacttcattgatcaatcgcaatcgttaaacttgttcatgcaggatgctaactattctaaactaacgtctatgcacttctacgcttggcaatcaggtttaaaaacaggaatgtattacctaagaacaaaatcagcagttgatgcgattaagtttacgttgaacaacgataaaaaagaagaaacaaccagtactttagtcccggaaactgaagcaatcagcgttgaagattacaaagcaatgttgctaaaagcgcaagctggagatcctgaggattgtgaaatgtgtgggtcttaacgattttagattttagattttagatttcagatttttagaatataaaagcagttatcgtaaggatagctgctttttttattggcaatctagataaacgaggtattttggctgacttctttttgatatagttcatggttgaaacttagaaatacaagatattttgtagtaggcctcgcaatatttttttatattattatggattgtcttcagctttagctggagctttttagtttttttaagatggctttagccgaaatgtttttctatgattgtattgcagccttcagttatagatgctgacaattcaaatacaatatccccaaaaattccccgttttaagaattaccaaagattttaaagccttagcaccttagtaactaagcatctcagaaccttctctttaaacctttaagagaaagtcaagtcttattgtaataatttctgaattatgaaaaaaagcaatctttggtcattacgattgggtttttccggaaaagaatccgattcgattgaaaaattaggaatagaaaaattcctgaagcagtcctatcaatcaaaatttgatacccagctccccgcttttctggaagatgatcccaaaacattagtagaactcaaagaacttaaagagtctattaaagtggcagattcagagggaaaaaagaaagccctgaaaaaggaattctactccgctgtagagttgagaaaatggtggatcggaaaaatgcgtaatgacgaatttccattacgggagaacatggtttgcttttggcacaatcactttgtctccacttctcaaaaagtaaaagtcaattactggatttaccagcacaatatgattctgcgggaacatgcctttggaaactttaaagagcttatcaagcaaatcataaaatcgaatgctatggtaaagtatctggataatgtcgataacaaaaaaggaaaatacaacgagaatctcagtcgtgaattattggaattgtttaccattggaattggaaactacaccgaaagcgacattaagaacggagccagagctttggccggactgaattacggcgacaacagggctgcttacagacggtttgctgaagatgattcagacaaaacctattttggtaaaatcggaaactggaaagcagatgatttggtcgatattattttcgaacagaaaaacattccatatctcattacccgaaaaattctgaaatggttcatttatgacaatccgcctgaagatttggtcacttactatggagattattttagaaaggtgaaatttgaaatacagcctttgctgaccaaaatttttaccgaagagtataagaaagagaattcaggaaccaaaatcaaagatccgttagtttacattttacagcttttagaggaactgcatatcgacgatgttgatgagagtatgattttgttttttctgaagcaacaaggaatggatttatacaatcaggttaatgtgaaaggctgggagggaggaaattcctggctgacttctcaggtgtatctgcagcgcaacaacacagccgatttactttgttcaggaaaaagtatcactcgaaaaacgttgaacaccatgactgccgatgctgaaaaaccaaaaccgcagtttgaaaaagtagatgtaaaaatggactttgacaccaatggtactaataaaaccatcatcacggaactttccaacagattattgtttaaagtaaatgattcgatgcaaaaagacatggagaatttactaaaatacgatttcgatcccaaagaggaacacgccaattttgccgtaattcggctcttcaattatattacaaaactgcccgagtatcaattaatttagaagttattatcatgaacagaaggaattttctaacgcttacaggaactcttaccggcggaatgttggtgcttcctgattttttacacgcatttggttcgcagagtagtttaattgtaggcgagcaatgtgtggtgtttgttcagttaaatgggggaaatgatggattgaatacttttataccgtacgacaatccgctgtattacgactatcgtacaaaaatagctttgaatagagacgttgttattggtaaaaataaaggaatggcatttcatccggcattgaaagatctggctcagatacagcaaaacggagatttgaccgtaattcaaaatgtaggttatcccgaacccatccgatcacactttagaagtcaggaaatttggcaaaccgcaacagattctaataagtatagtaacgaaggctggttaggacgttatttagatttacaatgcaacggacatcaggctacagcgggaataaatctggattcgatcgataatctggccttaaaaggaaatgaacctaattttataaccgtaaaagacccaaaccgatttaaggtaaaatcagataaagaagtaaatgtaaccttgtctgataatccgcaattggattttgttcgaaaaattgccaattcggttacagagggatcggatgaaattcagaaggcattgacaaaatcaaagtcggaaattagttattcgaaaacagaattgtctaaaaacctggaatggattggccgattgattaaaggaaatctaaattcgaaagtatattatacctcgctgggcggatttgacactcatgacaatcagctggctttgcacgaaagaaaattaagggagctgaatgacgccttgtatagtttttatcaggatttgaaacaggcaaagctgcttcagaatgtaacggttgtagttttttctgaatttggaagacgtgttaaagataatggaaacggcacagatcacggaactgcagcgccaatgtttataattggcggaaacaacagagggacaattttaggtaagaaccctgatttatctaatttggataacggagatctgaaacatgaaattgattttagaagtgtgtacgcctcattattacagcaaaaaatgaatttcgattacactaaaattggaattaagaatgcaccggtttcgggattattttaggattgcgagagagctacgaattcacggattttttgtttaaaagctgcaatagtttgaaatcattcgtgaattcggggcaaataaatagtgttcttaatttactctattcaaggcaatttttaattaattttgtactattgataatgtattaatactgaaaatatggaaattaaaaatctatctaaatatagtaatgccgaaaaaattgttttggcagagcaattgtgggacagtgtttctaaagatgatttagaaatttctgatgatgttaaaagagaattagatattcggatacaaaacttagaagaaggaaagtcagaattgtattcttgggaagaggttcaggctcatttgaaagctataaaaaataaattttgaaatgacattaaatatacaactactatttcctcttttaataacttcaataattacaatgtttggatggtttatattgcataaacttggtcaaaaaagagatttagagaataaaaggaaagatttaagaattacatatttgattgaagcatggaagaaattggagtatgcttctaatagagaacttaatgaattagaatttatagaatatattgaaaattcaatagcattgattcagttattcggaacaacgaatcaaatcatattagctaaaaatattgctgacgatatgaaaaaaactacgataacgagcttagatttaatattagaagacttaagagatgatttaaggaatgagttaaatcttgaaaaattaaatagaaaaatggtatttgtgagatataagaaaaagatctaagatatttattgccaaatttttaaaagctacgaataaaatcttaggaacttagtacctcagaaccttagtatcttagaaaaaccaattgtaaatatctcattttagatctaaattgccctgaaagggcaaaagcaactaaaaacaaagtataagatcttaattaaaagttatgttataaaataagataggtgctttttgggttatgctttcgcccttacagggctaaaacaatcatcatcattattgatggtgctttgcaccgcactgttacagaagctctttcagagcaacagatcccaaacacttatctcttatggggtaagctgtaaattattttttttcaattaactaattattaggaaaatgtaaaacctttaaagattgcaaaaggctgtcactttcattcctaaagtactttaagataaagagagtactattttattacgctgcgatccctcaaaattaattacaataaagagttcattttatcctacttcagaaaaaaatcggcatcgattaaacggtttccggtgtcgtcgtaaacggcgtagttaaaacctccctgaatgcaatacgaaccatattctccggctttgttcagggcaataaaacctacctgaatgtcttttaaatctttatttctgtttttggttaattttacgattcgggccacggcttcttcacaggctttttgaggtgatttaccttgtcgcattaattccaccacaagatgacagcccgaaatccggatgacttcttctccatgtccggtagcggttgcggctcctatttcattgtcgacatataaaccggctccgataattggggaatcgccaacacgtccgtgcattttaaatgccattccgcttgttgtacaggctccggaaagattaccattggcatccaaagcaatcattccaatggtgtcatgattctcaatattcgcaatgggtttgtatttgctgtctttgagccattctttccattctttttcagattcctctgtcagcagattttcttttttgaaaccctgtgctaccgcaaattgcagggctccatcgcctaccaacatcacatgaggtgttttttccatgactgctctcgcaaccgatatgggatgtttgatgtattctaaagcagcaactgatcctatattagcgttttcatccataatacaggcatctaatgttacacggccatctcggtccgggcgtccgccgtagcctacacttctttctttaggatcggcttccggaattttaactccggcttcgacagcgtctaaagcagttcctttgttttttaaaacttcccaggcagcttcattggcctgaattccaaatctccaggtagaaagcacaatgggcttttttccttttttagaaactatgtttttctcttcttcttccgaattggattgaaaagattgcaaggctaccgctactgaagcaatagctgccgttttaataaaattcctgcgatttgaatttgtcatatctactattttacgggccgctgatcattttttttgccacagattagaggattcaaaggatgctctaatctgtgttgtaaagctttttaatcggtggcatctaatataatcaaaactatgctgtataaagcaaacttgttgcgcctaataaagctgctttttcgttgtctgtagaaacagcaacattgatggcgcttcctgcttcttttatctttttgttgaaaattggtagaaaaaattcacttgcgttggcaatttttccaccaatgatgaaactatccgcatcgaatttttccaaccatggaataacaatcgcagctaaatcttctcccattttttcaaacacttctatcgcgactttatcttcggctttggccaaattaaaaagctccaatccgttgtttattttttttccgcttaaagcaaaataaccggctataagtccacgtgcggaaacataatcttcggcaattccttcttgataaggcagatcgtatatttctccgtcttttggtactaaatcgcccgtactaatcgattcgcctttgtctataaaacaagctccaagccctgtccctaatgtgatagccattacttttttagaaagattttcagcatctttaaatacttctcctttaccaaaacaaacggcatcattttcaaacaatatcggaaaatcacccgacagcttcaattgattctgaaacagatcgcgaacattaagtccataaaaatgctcgtattttgattgcccttttatccagcaaacaccattcgtatagtcaaacggacctggcatgcaaacggccaatcctgtggtattttcaacttttgagttttcgatcgcggtgcgaattgctttttcccagatggtcattacttctgctacaggcaaattcgaatcgaaagattctttgtgcagtgaaaaatcgatcactttcatgtctactatatcaataatcgctgcggtgatatgtgtacctccaatgtctaatccaacggcatattctttattcattcttttgtattttggatttgaaccaatatgcggattagaaaaatttagttttatttttttcaacattaagaaattaagtttattaagtctaacggcttcatttttcttaatttcttaatggtgaatatttttatctctagttttactaattccttaatggtaaatattttagtttaaatgtttttatcttttaaaatttgaggataatgaatgctggtatgtacaatcatttctccaaatagggtattggcccatgcaaaccattttcgggtaaatttggctacatcgtctttatggaatgactcgtgcatgaaaccggtatcggcatttgttttgatcaggttgctgatgcattgtttaatttcctgctcgtctacgctggtaatggctctcaaaacgatactcattggccaaatggtatctgtcccggtatgcggaccgccaattccttctcctgcttttcctttgtagaaaaacggattgttctctgaaagtaccacttttcgggtattcagatacaatggactgtcgggtgctattgcgcctaaatacggcaaagacaataaagaaggaacattcgcatcgtccatcatgtggaaactgccgtaaccgttaacttcaaaagctatgatttttccgaacttaggatgttcgatgattccgttttcttccagtcctttttgaacctgtccacgcaattctttggcttttgctaccaaattatcatcttttaaagccggtaaagagaaaatttcgatcagataccccaatacttcgatcgcgaacatattactcggaattaaataaccaaacagcgtactgtcgtcactaggtctgaaagtcgaaacaattaatccgcatggttttaccggatatccgtaaccgcttaaaggtactccgtctgtcgcccaggctgtaacccgttggaaattgtaaggtcctttatcgtgcattctctgctgctctttgaaagtctgcaataccaaaagcatcgcttctttccacttgctgtcgaacaaactgatatctcctgtttccttccaataaccgtgtgccaatcttatcgggtaacataaactgtcgatctcccatttgcgttcgtgaataccgggctgcatcttggtcatgtcgtttttccactcactcacttgcgcaaaatctttgtagaaagcgtttgcatacggatctagcaaaatgcatttggtctgacgattgattactccttttaccagttctgccagttttttatcttcttttacaaatggaatataaggccagatctgcgctgtactgtcacgcagccacatggcatcgatatctcctgtaatgacataagtatccggttttccgtcgataatttcaaaatcgacagtggtatctaaggtgttcggaaaacagttttcaaacaaccaggcaagttccggattcgcaatttgttttttgattcttacaatggcagcttcaattgctctactggtaaattttcgttctgccaacggaggtcttttggtaataaaatcttttagtgcaaaattgaatacatccgattgcattccgaaaacatccgtttgaagcgccaataatcctgctgaaaaaatccctgtattttttataaattttctacgtgactgcatagtattattttgaagttgaataagaatatggataggcacttgaagaagttcctctttgtaaattgggtttactgctcatgtcgaaattgaattcccctccttttaatacttcaaaatggttgatgaagtttttggtatgggtggtgttgttccattttaattcctgaacgtatttgttgtcagctgaattgtttggagcattgatgaccaaatgttttccgttttcgagttccagcgtaattttcttgaacaaaggcgctccaagtacatactcgtcggttcccgggcaaaccgggtagaatcccatagccgagaaaatataccaggcagaggtttgtccgttatcctcatctccgcaataaccatccggagtgggtttgtacaaacggttcatcacttctcttgaccaatattgcgttttccaaggctctccggcatagttgtacaaataaatcatgtgctgaatcggctgattaccgtgggcatattgtcccatattcataatttgcatttctcgaatttcatgaataacagctccgtaataactgtcatcaaaaaccggaggtgttgtaaaaacagcgtctaatttggcggtgaattttttctcccctcccattaaaccaatcaagccttgtacatcatgaaatacactccagctgtaatgcaaagcatttccttctgtaaaagcatctccccatttaagcggattaaaatttttcgggaaacttccatctttatttctgccactcatccatccgatttcaggattataaagattcttataattcatcattcttttttcaaacaaatcgatttcttttttcggacgatttaatgctttcgctaatttccaaatcgtaaaatcatcgtaggcatattctaaggttcttgccgcattttcgttaattttcacatcataaggaacgtaccccaacgtgttgtaatacgatacaccctttcttcctactgcttctaaaggtccttcattattcgctccgtgtactaaggcttcgtacagtttgttgatgtcataaccgcgtaatcctttcatataagcatctgaaactaccgaggcagaattgtttccgaccatcacgtcgcggaatcccgggcttgaccattccggcaaaaagcctccctctttataatcgttgatgagtccttcctgcatttctttattaatcgaaggataaaccaaattcaacaaaggatacaaggcacggaaagtatcccaaaaacctgttcctgcgaacctataacccagcaatactttaccattatacgggctgtagtgtacagtctctccttttgcattgatctcatactgtttttgcggaaaacaaacggtgcggtacaagcaggagtaaaacgtttttaattgttcttcgcttccgccttcggcatttaattttcctaaaactttattccattcctgtttggattgtgctacggtttcggtaaatgatgctgtacctaattcgttctttaaattcaattcggcttgttcgaaactaataaatgaagaggaaacttttacgtttacgatttctccctttttagttttaaatccaataacagcacctacatgattgtcttttaattcgagtttgtctttttctaaaactttcccgtgccaggcagcagtagccgcaaaaggcttatcgaattgcagtacaaaatagtttttgaaattctcatgaactccaccactattgcgggtggtatagccgataattttattttcagacggaattattttgatgtaagatcctttgtcaaaagcatcgattacgatagaagactgttcgttttccggaaaggtgatctgaaaatgtgccgctctttcggtagtggtgatttctgtggttacatcgtaatcggccaggtaaacgctgtaataatacggctttgaaacctctgctttgtgactgaaccagcttgctctttcgtcttcggtaaaagccaatttaccggttacgggcatgatcgaaaactgtccgtaatcgttcatccagggtgaaggttgatgggtttgtttgaatcctctgatcttctcggcagtataaatataagcccaaccgtcacccatttttccggtttgtggtgtccagaaattcattccccaaggtctgcaaatcgccggataagtatttccattcgaaagactgtgcaaagattgtgtccccattaacggatttacatactctacagcatctatcgctttgatctgtgcattaacaaaaccgaagcattgcaatagtcctaaaaaaagtaaactctttattttcatgtttttgtttttttgctttaggctttaagctttaggctttaagctaaaaacggtaactgatctcttctaaaaatctatactctttattctttattctatattctttgttctttgttctttgttctaaaatctaaaatctgcaatctaaaattctaaagcggcctgtcttcttttttcactccaaaagtcatcgacggtttgcttcccatatacaatttcaattctcctccttttacgatcatatcgtgtgtgatgtatgattttgtataaggtttcccgttgtactctgctttttggatatagatatttgtcttgctgttatcgattgctttcagtgtaaacgaaataccttctttgtgatgtatcgttgccgtattgactaacggacttcctaatacataaattccgttggccggattaaccgagtagaatcccatagaagacaaaacgtaccaagccgacatttgccccaaatcttcgtttccgcacaatccgtccggttttgtcgaatagaatttctcatcgatttcacggattagttttgccgttttccagggttgtcctgcgtaagcgtacaggtacggaatatggtgattcggttcgtttccttgtgcgtactgaccaattaaaccgctaatatccggagagatttcctcgccttctactttgtctgtgattaagaaaagagagtctaatttggccagaaatttatcttcacttccaaacaaatcaatcaaaccataaggatcctgtggaactaaccaggtgtactgccaggcatttccttctacataatcgtcttttcggtgtgctgatgaaagcggattgaaaggtgttctccaatttccatccgtcaacttacctctcataaaagtggtttctttgtcgaagtaaagcttgtataaattggctcttttcgagaaataattataatcttccgttttgttcagatcctttgccattaaggctacgcagtaatcatcgatagcatattctaaagcatttccaacagattcgagcattttatctgcggggatgtattgcagtttttgtacataatccattccgtcgcgggtttgcatggctgtttttttgatggcttcgtaggccaaggcaacatcatatcctctgtatccttttctataagcatcaacgataaccgctatggagtgatttccgttcatggtattggtttcattccccattaaatgccaaaccggcaatcttccctgctgctcataaatggccaggaacgacttcacaatatcattgattttgtcgggctgtgtaagggtgtacaatggatgcagtccgcgatacgtatcccaaagtgagaaggtggtatagttggtaaaatttgctttttcgtacactttcttatcggtacctctgtaatctccgttaacatcattaaagatggaaggcgcaaacatggtgtggtacatcgcagtgtaaaaaactttcatcgttttatcgtcggctttgatctgaattttgttcagttctttgttccattttgaagttgcttctttggctacagcctcaaaattccaacccggaatctcggctttaatgtttgccgaagcattctcataacttaccggagatattccgacttttactaaaatctgtttgttttttagcgctttaaaatcaagaaccgctttcattttcaaggcttctccctcgtttccggcaattgcagtggtagcatcatacaaggccatcgcagcaattggctcggaaaattccatggtaaaaaaaatacgctgatctgcagcccagcctgaagaatatctatagcccacaagcgtggtttcattgatttttttgataaacgttttaaccggtttgtcccagccaattccatctgcaagatccagtaaaacatgattatcagtgctggaattaaaagtatacttatgaaaaccaactctttcactggcggtcagttctgctttaattttatatttatctaagaaaacgctgtaatatccggccttactcacttcattctgatgtgagaaataagagccgtaaccggtagtcatgtcttcttttgttcctttggtaagcggcacttttccggataccggcagtaaaaggatatcattgagatctccaattcctgttccgctcaaatgggtatgtgtgaagcctaaaatggtgttgctggcatagttgtacccactgcaccaatcccagccttcaaaaacatttacagggcctaattgcactgctccaaatggaacgttggctcccacaaatacgtgtccgtgacccgcagaaccaataaacggattcacatattgggtataatctaaatggggttgttttgccttcttttgctgtgaaacaacgggattggcaaaaaatagatttaaagctaaaatcccgctaaaagctattttgttatattttgtaaacatattatttttttattgacttgtgtgatgggccacggatgacactgattaaacagatttacacagctattttttaattttgaacctaaaaatttaaccgcaaagcgcgcaaggatttacgcaaaggacacaaagtacacgcactgccatgcgcctctacaaaaaacctttgtcgctttgaacctttgcaactaaaaatctcagaacctcagcatctcagaaccttttaagataaactgatctacaccgctatttttaaaatttaaccgcaaagtaagcaaggttttacgcaaagctcgccaagcaaacgcactccacctctgttaaaaacctttgtcgctttgaacctttgcaactttgtacctaaaaaactcagaacctcagcctctcagaaccttagtacctgctaagaacatcatatagagaataaactctaatgattggctttgctatcgcaccttcaaacgtgatggttttctcttctcctgctttcaaatcgaaatagttgtcgctccactttccggtatatccttttatagaaacgttgacgtatttggccaatttcgaggcttttagaatcaccttatttccttttacctgccaggtgatttttgggtcttccaattttagattgatcggacggttcaaatcaatttccggcgttttatcatcacggtaggcttctttcatagcgtaccatgctgctttgggctgtctgtcgtaataatcggtaacgctccagctagctaccggccagcaatcgttaagctgccaaaccaatgttcccatattgtaaggtgcttttgaacgatggatgccaataatatttttaagcgaatagtactgtaaacactgtgtgagatacgtataatcctccacattcattttcttaattttagtcgaatcaataaaatatcggttcaggtacgaatctaatttcatgaatccttttccggctttttgatgggcctgtaaaatatccgaatacaaatagcgatcttcaggttgcgtaaatctttcgatagacgaatagtttggcatggcctgcattccgtattcgctcacaaaacgtcctgttttattttgcacggcttccacatcttccaatccccaccaggttccccaataatgactgtcaccttcggttaaactttttgcttttgaccagtggaatgatggcgaagaactaatatatggtcgtttatcatctacttcttttacccattttgggatactgtcctgaaacaaacgaacgtaatctttccataaacgaatagaatcctgcttaggcattttcatgctcttttgccatccccaatctttaaaggcttcgtcgatttcgttattgccacaccacaaaacaatactcttgtgatgacgtaagcgtttcacctgatactgaacttctttttttacattggcgaaaaaagcatcatctcccggcaccattgttccggcaaacataaaatcctgccaaacgtagataccatttttatcacataaatcgtagaaataatcgtcttcataaataccacctccccatacgcgaagcatattcatattggcctctttggccataccgattactttttcatattcttttttggttactctggaaagaaatgcatccgacggaatataattggcccctttcatatagaccggttttccgtctattttaaaataaaaggttttacctaccttatccggttcctgaaccaattcgattttacgatctaacacatacggtttctcagcttcttttttatcataagcttctaaacgaggggttttccagattccgcaagtggtgaattttggtccccagtcccatccaaaatgatattgcgctttacgcacatacgcacgcggattgtccggaattacaaaaggtaaatcttttttggccagggaatcgactacattttgcgccgatttaaatacaataaccaggttgttattccctgatttcagtactttttttacatctacgcgccattgcaggaacatattgtcggcttttaaaactacctgattgttcagataaacggttgcataagtatccagtccgtcaaaaaccagttctgtatgttttttagcgagtgttgccgggcttacctgaaaagtcgttttatactcccagtctttcttttcaatccaggtcagttttttttcattgtcccgataaaatggatccggtatggttttattgttcagcaaatcggtatgtatttctcccggaactgtcgcaggataccatttttcagttttagtctcccgatactgccagccggtttttaaatctttattttgggcatttgccgccaatgaaaaattggcgagacaaacgccgacaaaccaataaaatctttttgtatactccattttataccaattataattatgtatctagtcttccggtttctggtataatgccgatgttgtatgaaaatggtctaacttttagtagacgataatgcatatacaatcggtattaactgactcataaactatttatccgttgcaatttattttaacacatcgtgacataggttctgtattcctaaaaaagacgttccacttcattgaaatacacatacccttctatgtgaaagaaatttatttctttttagttctctttttacacctaaaaatctatgtttctatgtgttaaatcaattttttaatgctgtcgccggcagttggagaaggataaatctttttcaattatttccttctcgctttaggtttttattacggaataaaagcaactaacaaaatattctgaaatcatttccttttttttacggctgccaagctttaattcattttagatcgctgatgttaaactctcgatttctgattttcgatttcttaaaagtctgtcctaattgtgatgttctttggatgataattccatctttttcagcagaagctaatttcttttgcgaaaaaaagggattaagatttatcgaactttttcggatacaactcctctaaattagtgaaaatcaaacagaaaataaaaaataagccgggaggtacaggtatccctacccggcttaactcaactaactcacctaacgcataaatttattgcttgtcccaccagattctggttgtcattaaatccaacccctggcgagcaattgcttctttataattagccgaattggtaatcaattctgactgatcgtaaattaatcttcttggtatagttccttttgtttctcctgttggatcatttaccggaactaaaaccggatatcctgttcttctgtattctgaaaatgcttcaaaaccattgaatagcaatacaatccatttttgagtgataatctgctcgattttttgagcctcggttcctgctgccttaaacggatttgcagtcatataagcggtatattctgcaggcgtaactgccggtactttgtctccaaaaatagtaagcacttccatagctgcttttacaccgtcttcataaaacttttgtgcatttcctccaacactccatccttttactgctgcttctgccaatataaactgaacctcagcgtaggacataattaaagtaggagcatctaagcgtaatactgtagaagtgttaggatctgaaaacttctttttgtctccacccggaaattctttagcatcattagcaagaccttgctgacttgccggattgttgtttcctgtagcttccagtttagcataaattctcaagcgcggatcgttactgtttttcaatgcatcgatatacgttttactgaatttgatattggcctctcctttgttcagatcattttgaacccatgaagaggtaattggattggttttaaccccagccggacctgaatcgtgttttaaaacaagactgtcgtcattagaagtaaaaacacctttcgatactgctttctctacgtattgttttgctttggcaggatttactttagacaaacgcatcgctactctcaacattaaagagttcgccagttttttccatttagtaacattactctggtaatataaatcggcattaccaacgaatggtttattaacatctaaagcatcaccagcttcgtctaattcttttaaaaggtcattgtaaatcgcttcctgtgtgtcatattttggggcaaaaacgtttccattgtatcctttacctgcatcaaaataaggaacttcaccgtaagtatctgtcaatttttgaaacataaacaccttcatgattctacaagcctgaatcatgtttgagttttccggtgcgtcttttgcaacagccattaattgaaaaatctgattcaatcctttaccgtaagactccccaaaaagtgctgcagaatattccggagaataggtatattttgaacctggtcctcctaatgaagaaaattgctgaacgatttgtgccgcatacaggttatttcctctggtatttgaaaaatcttgtccgtcaacgtagatctcagcaagtgtaaacattgattttacagccggatcaagcaaagcatttggattcctgtttaactcttcgaatcctttatcgcatgaagccaatgtcattgcccccacaactgcgatacaaaatatttttatatatttatttttcatctttcggtttgattattaaaatttcacattaagtgtcaatccatagtttctggtcaaaggcatagaagctctttccataccttgggcattactattagaatagtttgattccgggtcaatgtttggaactttgtcgtaaatcgtccataaattatgtgctgaaaacgctaagctgatggcttgaaatggtgtttttgacaaatatgtttttgggaaattatagctaaatgaaatggctcttagtttcacaaaatcggcatcgtaaacaaaatttgaagttacatcactatagcttctccagtaatcgtaagccgaaacagttgtgtttactgcatttccgttaacatcttttccggttacggcaactccgccttcacgaccagaaagtgtttgttctgttaatccgtaacgggctcctaactggttggtcgcagaataaatctctcctccaaatttagcatctacaaaaactgaaagcgtaaagtttttatactggaaatcatttgaaagtcccatagatgttggtgcaacaccttgtcctgcaataatcaggttccctctcaggaatttcccattagtatccaatacgacgtttccgttagcatctcttaaatagtcataggctttgattactccaaaaggctgtcctttttctaacaccacagaagctcttccgtctctgtttccttccaatgatttggtagtaattttatctgaaaggttaagaacctcactattgttataagcaaaattataacctacactccaagagaaatttggtgttttaaccgcttttacattaactgcaaattcaacccctttgttcagaatttctcccacgttaatttttgttgttctgtaacctgaagcctgagagatatcagcatctgtaatatcattcgtcgttttctttctgtagaaagtcaaatctgtacttactctgttgttgaagaatgtattttcgaaaccaaactcgattgtagttacgttataaggttttaaaaatttgttcggaactgtttctcctttaacacccaaaatcggttgtcccaaagcatcggtttgtccatctggtgcagtataattcaaagataaggcataagcttcctgcaatccacctccaacgttaccccaacctgctctgaattttccgtatgacatccattccggtaaatcgattacttccgaataaataaaacttgaactcacagatggataaaacgtgctgttgctggatggatctaaagtagagaaccagtcttcacgacctgttaaacttacatataagaaatctttgtatcctatatcggccgaatagaaaagagagtttacttcagtttcaccaaataatttctccgtttgagccggttgtgtatttccatagaaatattggaatggaacaatgaagttattccctttcattttaattccgctaaatctgttgtgttgacggttagctccgatgaaagcatctaaagaaaggtttttaacgatatcgcctttgtaccctaaataacccgaagcattgtattctgaacggttttctaatctgttttcataagatccgcccggaaggtagttgattccggtaggctcaatctccgtgtactcatagttaatatcatccactccaagaactgctcttgcgtagattttatcagtaatgttgtaatttacttttgcagaaccgataaaacgttttctaaggtcatcgtttaaaggtgattgtgatgcaaagtaaggatttgtgtgatagttatttgttccaaaataatcagcctcgccaccattttcatcaaaaccattactgatccatctgatatcagtacccggtgtcaggaaagtagttggaaaagaagggtttcttggagagtcattcaaataaggtcggttgcgacttttctctgtgatgtactgagcgttactctcgatgcttatttttttatttactgctgaatttaaacttaaagcaatgttatttctgccaaagtttgttcccggcatgatcgattcatcttttgtatttccgaaagacaatctgaaattagtagtttcgcttccacctgaaatagccaacgtgttactaaaagaaaatccggttctgtagaagttttcaacgttatcttttccgtaagcctggtaaggtttagtagttccgtcaatagccaaagaaggtgttccgtcgtatttatctccccaagcaaaataatacgcatctctaagttcctgtaggcttttaaatcttgtagcgacaccatttaccggtgctcccgctccgtattgatcctgccatttcaataaacttgccggtgtattaaaagtagagttggtactaaaatctactccaattccggttcctgtttttccttttttagtggtaattaagattacaccgtttgatcctctgtatccgtaaagagcagaagcggcactaccttttaataccgacatagaagcgatatcatcaggattgaaggaagacataccgtctcctttatcagctcctccccacattcctgcgtttccttgctggctgttatcaatcggaataccatcgacaacatataaaggctggttcaatcctgaagccgaagttgctccacgaattaccacacggctggatcctgacggccccgtaaccggcgcagaaacgttaaccccggcaattttcccctgaagggcgttccctaagttaatttctttattttttgtcaggtcatcgcctttcaattctccaacggcataccctaaacttttcttttgttttttaactccaaacgaggttactacaacatcttttaattcctgagtattttcgaccaataccactgaaattttgttttggttttgctgcaatacgattgattgcgatgtaaaacctatagaggatacttttaaagtaaccggtccttcgggcacattcattttaaatcggccttccgcatcagtgattgcactatacggttttccctgaacctcaatcgatgcagcaacaattcccttgttttctgcatcagctactatgcctgttatcaatcggttttgcgccacagctcctaagctgctgaacaacaccattcctaacactgccaatattcgtttcataagcattctttttttggttatttgtttgttttgatttttgtgattgtttctaaatttgattgttttaaataattaataaaaattttgaactcctttttaattaggatacttataaggtttgcaccttataaatatcccggccttatttatagtcatgtttataagcactccattaagaaatcgatatcgtaaactgatcagaaacctaactcattttcaatttaattgatctaaaatttactaaaacgatttagtaaaacggttaaaaaaaaacgaaccgtttcttttccctttttatttttttttctcaaaattttaaaccgattctctaataatcaattttccttttttaagacttttttctacttcaaacttctccatatccgtcatctgactcattaacaattgtatggattttacagcgatatcttctatcggctgttcaataacactaatggttggcgtatgcaatttaaaactgtcgtgatcatcaaaactaattaccgaaatatcttccggaattttgattcccattcttcggaaagcctgaagtccggcaagtcccatataattcgccaaaaacaaaaccgcgtcaatatcaaggttcttttcaaagaaatctattattcccgcaattctcgcctcttcattagtatggtaatccatgtgaagaacaagtgacggattgtacatttctgcttccttcaaagcatctctgtatccatcctcacgcagcttcatctgaatcatctcggaggtattatttaccaccgcaatatttttgcgtcccttactgatcaggaattttgcagccgaattggaggcttcataattatccatcaccacatggctcactctttgtcccggaaaatacctgtcgatcaatacaaccggtttttttaactttaaaagaagatcaatactattttccagattctgagttggcgttacaataaaaccatctacattggcctgtaataaactatgtatcaactcttcagaacgttcatcatctcctcctgtactgcaataaaaaaccctgtaatcaatactcttcgcttcatcttcaataactctggcaagatcagcaaaaaactgattcgaaatgtcttcaacaataagccctatagatctggttttcccggttctaagactggtagcaatcatactgggtctgtaattgagcttttcggccacttcctgtacctttttgatcactgccggactgatgcccatttttccccctttaccattgataacaaaagatacagtagatatggatacctgagcctctgtcgcaatatccttaatagtaatctttttcatctaatgagttaattttttattaagcagttattaattatatcacaaatatatataaaaacagttactaaaacgattttgtaattcttttttttatacaaatcattattttaaagttaattaaacatataatcatcagtatcaattatatattatggatggtaatttttcaccaagagtaaaagatgttattacctacagtaaagaggaagccttgcgtttgggccacgactttattggtactgagcatctaatgctaggcattttaagagatggaaacggaaaagctattcatatacttaataaccttgcagtcgatttagatcatttacgcaggaaagtagaaatactgagtccggccaatcaaagcgttgaagtaaatgccgaaaagaaaaaccttcatcttacgcgtcaggcggaaagagccctgaagaccacttttctggaggctaaagtatttcaaagctcgtcaattagcacagcgcacctgcttctatgcatcttacgaaacgaaaacgatccaacaaccaagctattgaataaactaaaaatagattatgacatagctaaagaacaatatttaaatatgactccaaacgaagaagaattcttagaaaacttgccaagaaacgaatcgtataatgacgattcaggacaagatgacagtcttaaagaaagcagtttcaacaatcccgccaataagtcaaacaaaaaatccaagactccggtactggacaattttgggagagatttaacagaaatggccgaggaaggaaaactggatccggttgtaggacgcgagaaagaaatcgaacgtgtttctcaaattctaagccgtagaaaaaagaacaaccctcttcttatcggagagcccggagttggtaaatctgctattgcagaaggtttggctttgcgtattatacagaaaaaagtttcccgtattctttttcacaaacgtgtggttacacttgaccttgccagcttagttgccggaacaaaataccgcggccagtttgaagaaagaatgaaagccgttatgaacgaattggaaaaaaacgacgatatcattcttttcattgacgaaattcataccattgtaggcgcaggtggagcaacaggttcacttgatgcttcaaacatgttcaaacctgctttggcaagaggcgaaatccaatgtattggagccacaactcttgacgaataccgacaatatattgaaaaagatggcgcccttgaaagacgttttcaaaaagtaattgtcgaaccaacttctgttgaagaaacaattgccatcttaaacaatgtaaaagacaaatacgaagatcatcataatgtaacttacactcaagaagctattgaagcctgtgttaaattaacaaacagatatatgtctgagcgtttcttaccagacaaagccattgatgctctggacgaagccggatcacgtgtacacattaccaacattgatgttccgaagcaaatcttagacttggagcgtcaactggaagaagttcgcgaaatgaaaaacatggtggttaaaaaacagaaatacgaagaagctgccaaacttcgcgatgatgaaaaacgcatcgaaaaagacctggctactgctcaggaacaatgggaagaagactctaaaaacaatagaattcaagttacagaagacaatgtagccgatgttgtttcgatgatgactggaattcctgtaaaccgaattgcacagaccgaaagtaacaaattagctcaattacctgagttaattcagaataaagtaatcggacaaaacgaagccgttttaaaaattgcacgttctattcagcgtaacagagccgggcttaaagatccaaacaaaccaattggttcgtttatcttcttaggccagactggagttggtaaaacacaattggcaaaagtattagcaaaagaattatttgattcagaagatgcgttaatccgtatcgatatgagtgaatacatggagaaatttgcgatctcgcgtttagttggagcgcctccgggatacgtaggatacgaagaaggtggtcaattgactgaaaaagtacgcagaaaaccatactgtgtagttcttttagacgaaatcgaaaaagcacatccggacgtattcaatatgatgcttcaggttttggacgatggatatttgacggatagtttaggtcgtaaaatcgactttaaaaacaccatcattatcatgacttctaacgttggagcccgtcaattgaaagatttcggtcaaggtgtaggattcggaactgctgcaaaagtggctcaggccgatgaaaactcaaaaagcattatcgaaaatgcattgaagaaaactttcgcacctgaattcttaaacagaattgatgatgtaatcgtatttaatgccttagaaaaagccgatattgacttgattatcgaaattgaacttaaaaaattatacagccgagtttcagaattaggatacaccttaagtcttaccgataaagcaaaagcctttattgcagaaaaaggtttcgacagacaatttggcgcaagacctctaaaaagagcgattcagaaatatgttgaagatctattagccgaggagatcatcacttcaaaaatacattcaggtgatgaaatcttaatggatcttaaagatgattctcaggaactttctgtagaaatccataaagctgaagaaccaacaaatcaatagattagtttaaatttataacaagaataacatacccgttacgttttcataacataacgggtattttttttaaataatttgctacctttaataaaagcaaatagctatttttggccattaaattctataataaaaaacaacgtatgcttcaaaacaaagtcattttaggtagcgaagaatggtgctcatttccagaactaggaatcccgacaattaaggctcgtgtcgattccggtgccaaaacttcggcaatgcacgctataaacatagctccttttataaaaaatgatgccaattgggtaaaattcgacattaacccaattcagaataatattaaaaccatcattcactgtgaagctccgttggttgacaaaagaattgtaaaaagttcaagcggatttagagaacatcgttatgtaattcagacacatttaaaaattggcgatatcaaatggccaattgaaatgacactaactaacagggattctatgggattccgaatgcttttaggtcgtgaagccatgagcggacgcgtattagttgatccagaagaaaaatatcttttgggacaaccaagtcctgaagccttaaaagaattgtaccaaaattccgaaaaagcaacctccggattaagaattggccttctggccagtaatcctgaattgtacagcaataaaagaatcatggaagcgggtgaaatgcgcggacatgaaatgcattttttgaacatcaaagaatgttatatgaagctggatgccaaaactcccgaaattcattatcgcggtggtaaaatactaaaccaatttgatgctataattccaagaatccgaccaagcattactttttacggctgtgctttaacacgtcagtttgaagcactgaaggtttttgtactgaactctgcgacagcaatcactcaatcacgtgacaagctttactctttgcagcttcttttaaacagcggaatcgatatcccaacgaccggatttgctaattctccgctcgatactgacaatttaatcaagatggttggaggttctcctttaatcgtaaaattactggaaggaactcagggaaaaggagttgttttagctgaaaccaaaaaagcagcagaaagtgttatcaacgcctttaagagcttaaatgccaatatacttgttcaggaattcattaaagaagcaaacggaaaagatattcgctgttttgtgatcgacggtaaagtggtagccgcaatacagcgtgaagcgatgccaggtgaattccgggctaatatccatttgggaggaaccgcatctgtcataaaagtaactgctgaagagaaaaaaatagccataaaagccacaaaagctatggatttaaaagtagcaggtgttgacattattcgttcttctaaaggaccattattacttgaagtaaactcttctccgggacttgaaggaattgaaggagccaccaacaaagacgtagcaggcgaaatgattaaagcgattgaaaagaactttaaattataatcgattctttttcagtaaaaatattcatttagacctaatgtctaagcattaatttagcaactttgttgaggttttactttgacaaagtttttttttaattcaaatcataacgaaatgatgctatctccctatttagatattatcttaagaagtctctccgtctattttttcatgactatcgctttgagaatctttggaaaaaaagagctttcacaattgaatacagccgatattattctgattttattaattagtaattccgttcaaaatgccatggttggtccggacactagtctttggggaggcttagttgctgcattggctttgtttataattaattacatcatcaaaaaactaacacacaaatacaaaggtctcagcaatttactactggacaaacctgaaatcctgattcataatggagaattggattttaaaattttgagcaaactagacatttcgcacgaagaattaaaagaagcagcgcgcgaacatggcctagagcatttaactgatgtaaagcttgctatgcttgaaattgacggcaccattagcattatttcaaaagacaaacagaatcttaaacaaacacattacaagcgaaaacacaatagaaagaatttacaaaaataacccctaccatacttacatctgtcgcggctactctttaggctatgcgaagagcaacaacgaatgtaattcttctacgcttgaagaaaaatggaacaaagaaatacttctgaaacagtacggaaaagattatttattctcaaaagaataccccctactaaaaaaagcttgtttcaataaagaaactagctttttttttccaaaattaatacaattccttaccctggttatcggtttcaaaatcagtactaattttcttaatcgttttatttgtcaaaccatacgcttttaatctgtgattgagatttgccagaatataatctttttcttttggaaatttttcagcaatccttttataatgctttaaaagccttttatcctctaccccatccaatgcctgcaaagttgcatgaataactctatttgaactatcttgaagcccttcgataaaaacactgagatacttgtttttattacccatttgaccaagtgcataataagtactcactcgtatttcttcacttttattaaacataaacgggacaataatttcaccataatccaacttcgtttcttttaacaaataagtacaaaatctaaaggtttcatcatcttcaatcgtatcagcatttgctttaataacctctatccagtccgcacttttgccttttgcataccaaaatacaaactgaaaaacagccagtaaattctcttttacaaaatcaagcaaataaggttttgaacgctcataatcaaacttagcaagtacctgaagtattgttttttgattttctcctgagcttaccttatactgctcttctaaaacagtaagaatttcagaccctacggcactctttttcaaaatcccgttcaaacattcccttttaatttcatcatcccctgtagaaaaatacacttctaaaatataacctgacaatcctcctaatgtatagcgaaataaatccggttcctttgccattgtactttcgggaataatttcatcaagccatctttcgtaccaatctaaaaaattagattcaaaaacaaagaaaggtttctgtctctcgatatcaacattaacaatccggcctttccattcaccgtttaaaacaagagcgtaataataagtacatccttgagtaccgataggcaataatcccgaaaatatctttcctaattcagcataaaaatcttcattcgaaatctcatcattttcttctatgatcctgtttaaatcctcccaaaatgagtcagacattgttagatccagcttacaatcttctttcaggtatttttttgcattctcagaaacgaattcgtcgacattttctccaaacggaaatatcccgtaaccaggtcctgcagcggaattctcataggagatccctccgttgccaacgtgtactaaaaatgctctataatcctctggaagctgtacatcatactccttctcaaacgctaagattttatctttatttaccgtttcttttacaatatatttatgactgtcagccccaaacacttgcaaatccttgtctgcatttttcgccaggatcaacttcctttttattctttctatctgattcaatagctctgtttccaatctgtatttctttatttttgagtaaatataaatacattataatttcaaaacaacccatcataccaaacaaaaaagccgatttcaaattgaaatcggctttaaaatatattaagaaaatgtgatttacatctcacattttacaataatcattttactaaataaacacactcaatacaaagtaaaccaaaccggctaatattgctgaaattggaatggttagtatccatgcccagattaaactaacggtaactccccaacgaactgcagaaacacgttttgttaatccaactccaataatagaacccgtaatcgtatgtgttgtacttaccggaatttttaagtgttctgtaaaataaagcgttaaagctcctgcagtttcggctgcaactccttcaaacgaacttacttttgtgattttggaacccattgttttgacaatcttccatccaccacttaaagttcccgctgcaattgcagaataacaagccaaaggaatccatcccggcattactccttttacccctaaatcatcgtttggcaaaacaacatctaaccaggaatccatgtgtacaccaggattagtgttgatataaaccgctaccgcagctgcaataatacccattactttttgagaatcattccctccgtgacctaaactaaaagccgcagaagataataattgcatttttttcaaagcagcatctgcctgatgaagatttaaactactgaatatcaaacaaaacaaacttacggttaagatgataaaagcaactaaaaaccatttaatattatgcggatcaaaagctacactccaaaaatgagactcaaaacgtggttttccatgctcaacaatctctgaataaggaatcattaaactgctcaccatccagattgtcgcaatcatcagtgctacagtaaatatttttggcccaatacttttacgtgaagcattcaacaaccagatcgaaatcaagtaagaagccaatgctcccaataatggcgccaatacaataaaagcgataataataagtactcctgaaggcattgctccttctttaccagccttgtaccagcttacgatttcgtaccagtaatgcgttgttccgtcttcgcccacataacctgaaaatccatgtacagcgatcgcatgagcaattgctgctccggcaaaaccaccaatcagcgtatgagaagaacttgaaggaatccctaaccaccaagtcaataaattccaacaaatagctgctataactcctgcgaggattacaacaaggttaatttccatggtgtgcgctgttttagcaaccgtatcggcaacaccaaatccaaaaacccaataggccagaaagttaaaaaatgctgcccaaagaacggcctgaaaaggcgtcagaaccttggtcgcaacaacagtcgctatagcatttgccgcatcatgaaaaccgttgatgtaatcaaaaattaaagctaatactataataattataagtagcgtcataaattataacttcagaatgaaataaattgaattaagaatgttttacagaaatagattccagtatgttcgcaacactcttacatttgtctgttgctgattctaaaacagataacacttctttatacttaatgatattttttgcgtctgtttcgttttcaaaaatttcaaaaactgctttgttataaacgttatccgacttgttctccaatttattaattctggcacaagcttctttgataatgttcatgttttttaagttacttaactcttttacagcactgtcgatgttctgacaagcttcaaggttaatttcggtcatctttctgattgactttgtaatcttatctacctgatataatttcattctacttgccgcaccatgaaggtaatcggcaacgttatcaattgaagtaatcaatgtatgaatatcctctctgtcaaatggagtaataaaatttctactcaattcaagattggtttgacgtgtaatgtcttctcctttttgctctaactcatcaattttttgaaaaagaacttctctttctttcaatggaaggtttacagcttcgtgtaaattagaagctaactcaattagattgcttgaagcctcttcaaaaagtggaaagaatttcttgtctttcggcactaaaaattggaaaatactgtttattgacatttttatatttttgatagtgcaaaattacttcaatattattttgccatgttaagccattgttaacaaatcgttttcaatttgaaaactgtcaaggaattcaactgttttttcaatatcataatgcaggattctgtcttctttaaccaaaggcaccacttctctgtaactgcttaagaatgtttcaataaaatcacttgatttcaaaggttctctgtaagcaatcgcctgtgaagcgttcatcaattcgatagctaaaatacgctctaagttgtccataacacgtaatgcttttgtggctccgtttgctcccatacttacgtgatcttcctgtccgttacttgaaacaatactatctatactcgaaggtgtagccaattgtttgttctgacttgcgatacttgccgctgtgtattgcggaatcataaatcctgaattcaatcccggattatctaccaaaaatgccggaagattacgcaatcctgaaattaactgatacgttcttctttcagaaatactgcctagttctgccaaagcgattgctataaaatccaaagccaaagctaaaggctgtccgtggaaatttcctcctgagataatctgatctgcttcaatgaagatattaggattgtctgtaacagagttgatttcggttttgaatacttttctaacgtaatcaatggcgtcttttgaagcaccgtgaacctgaggcatgcaacggaaagaatacggatcctgtacgtgttttttctcctgagcaataatttcgcttccttccaaaaattccgtaaggcgctgtgccgttacaatctgtcctttgtgaggacgtataaaatggatcaattcgttaaaaggctcaattcttccatcaaaaccttctaatgaaattgctccgatcaaatctgccaaataagaatatttatatgcttttaataaaatatgtgctccgtacgcactcatgaactgagttccatttaataaagccaaaccttctttagactgtaaaacaattggttcccagttaaaatgttttaaaacttcggctgcagttgtttttttaccttcaaaaagaacctcaccctcacctaataaaggtaatgataaatgtgccaaaggtgccaaatctcccgaagcccctaaggatccctgagtataaatcaccggaagaatatcattattgtaaaaatccaccaaacgctctaaagtctgcaattgaactcctgaatgtccataactcaaagattggatcttaagcaacagcatcaattttacaatttcagccggaacctcttctcctgttccgcaagcatgcgattttacaagattctcctgaagtttcgataaattttcattcgaaattttcacattacaaagcgagccaaaaccagtattgattccgtaaataggttcagaatgtgaagccatttttttatcgagataatcacgacatttttgaacgttcacctttgcttcttctgataattcaagtgttttttgattgacaataatttcctgtaaagcttctaaacttagggtttctgtgcttatataatgaatttctttcatgctgtttaaattttaagacttcaaaattcagcaaatcaatattaaaaagcaacatttattcctaataattaaaaaatgattctcacgaattccccgattttgctcttttcacaatagtaatcagacaaaaccaagggcatctttttatcataaaaggactcctctgttttttaacaagaaaacagcaaaagcaattaattcctaccgattttatagactaatgacgcttttcaatgtttttcgagattaaaaatcagactattaatcatatctcttttaaagataagcttcaataattatatgaatccatcaatttaatacacacaattctgacaaaaagctcaatattgatttgctgaattttgaatttttaaaatattcataaaaagaccggaaagatttttaacttttataaaaaactgtacttttgaaaaaccaaaatgaaaagtaacagcgtaaaatatcattctacactaacaactcaaaccagagttgcaatcgctgctattacaatttcaactacaacaattactaccccttaggggtatacattttacatatcactcaggttacctagtacttttttctaaaaagaagagagttattggatacataaaaaacatttacaaagaaaaaaaatagtcgcagttttcagtttcagttcacagttgataacctttgaacctttgttactaaaaatctttgcgccttattaaaaacatcaaaaatgaaagtattaaaatttggcggaacttcggttgccaatgcacaaaatataaaattagttctcgaaatcataaatcaaaaatcgaagcagagccaattggttgttgtggtatcagccttaagcaaagtcactgatttactgcaattggcagcagcaaaagcagcagcaaatgacgaaagcttcagagaaattgtgggcgaaattgagaaaaaacaccttgacactttaaaagtacttatcccggttagcgaacaaagcagtttgttgagccatgtaaaaagaatcatcaatcacttagaaactttgttagacggttgtttcttgctgggtgagttatctcccagaactgccgacactattttaagttttggagaattactttcgtcttacatcattgcgcaggcgtatcagcaaattgataaaaatgcagtttacaaagacagccgcgaactgattaaaaccaacaataactttggaaaagcggttgtaaattttgaagtttccaaccaattgatcagaacgtattttgccgaaaataaatctaaaattaatattcttccgggatttatttctcaaactcttgacggaatcgccactaccttgggccgtggaggttctgattataccgctgctattgttgccggagcacttgaagcggaacaattagaaatctggactgacgtgaacggaatgtttacggccaatccaaaaatcgttaaacaggcccaccctattgcaacaatctcttatcaggaagctatggaattatcacattttggtgccaaagtgctgtatccgccaacgattcagcccgttttaagaaaaaacattccaattttaatcaaaaatacttttgaaccggaagctgaaggaaccttaatttcagatcaggttttatcaaaagatacggttgtaaaaggaatcagtcatatcgataatatttcaatggtaacacttgaaggtcctggaatgattggagtttcaggttcgtcaaaacgtttgtttgaagtactgtcccaggaaaaaatcaacgttatttttatcactcaggcttcttctgagcattccatttgtattggaatcctgaattcggatgcagataatgccgaggctgccatcaacagagcctttgaagtcgaaatttcgcaaaataaagttgatccctgtatcgtcgaaaaagacctgtgcattatcgctttggtgggcgaaaacatgaagaatcatcaaggtttaagcggtagaatgtttagcactttaggaaaaaacaatgtcaacatccgtgctattgcacaaggagcctctgagcgtaatatctcaactgtaattaacgaaagggatgttaagaaagcattgaatacgctgcacgaaaatttctttgaagaaaacaccaaacagctcaatttgtttgtgatgggtgttggaaatgtgggtgaaaaattcatcgaacaaattcacaatcaaagaaagtttttaaaagataatttgaagattaacgttcgtgtgatcgcgttgtcaaattccagaaaaatgttttttgaagaggacggaatttcgttaaaagactggcaatcggctttagatcaaggcgaaaaggctaataaagaagctttcatcgcccgtgcaaaggaactaaacttgcgtaacagcatctttgttgatattactgcaagtgcaagcgtgtctgaaacctacgaaaatttcttaaaacaaagtattgcggtggttacctgcaacaaaattgcctgttcatctgcctatgataattataaaaaattaaagaatttatcccttcagtacaatgctccgtttttatttgaaaccaatgttggagctggattgcctattattgataccgtgaaaaacttaatcgcttcaggtgataaagtacataaaattcaggcggttttatccggaagtctgaacttcattttcaacaatttcgataaagacaattcttttcacgatgtggtaaaagaagccggagtacaaggtttcacagagccagatccgaaaattgacttaagcggaatcgacgtagcgcgtaaaatcctgatcctgattcgcgaaagcggttacgaaatggatattgacgccatcaccaacgaatcgttcctgccagcggaatgtcttgccacaactaacaacgaagatttctttacttctttaacccaacatgctcctcatttttcaaaaatctatgacgaagcagtaagcaaagattccagattgaaatatgtagcacaattcgaaaacggaaaagcaagtgttggtctgcaattcattccaaaagagcatcctttttacaatctggaaggaaaagacaatattgtacttttctacaccgatcgctacgtagatcagcctttgctaatcaaaggcgccggagcgggtgcagccgtaaccgcatcgggaatttttgcggatgtgattcgaattggaaatatataattttttgtttcaagtttcaagtttcaggttccagcaacttgaaacttaaaacttgaaacctgaaacaactaaataatgacacaaataaaactattttgcccggccacaatcgctaatctctcctgtggatttgacgtattgggactttgcctggataatgcgggcgacgaaatgattgttcgaaaagtagctcaaaaaggaattcgaattaccaaaattgagggagccgatttgcctttagagaccgagaaaaacgtttcgggggtggcagctttggccatgttggagacacttgacgtagattgcggatttgaaattgaaatttacaaacatatcaaagccggaagcggaatcggaagcagtgctgcgagttctgcgggagcggtttttggaatcaatgagcttctgggacgcccttattcccgcaaggatttggtgcaatttgccatgcagggtgaaaaattagccagcggaaacgctcatgccgataacgttgctcctgcccttttaggcggttttactttggtaagaagttatagtcccttagacattatccgaattgacagccctgaagaattgttcgcaactgtcgttcatcctcaaattgaattgaaaacttcggatgcacgttcggtactaaaacaaaacgtttcgctaaaaagtgccatcatgcaatggggaaatgtaggcggacttgtcgcaggattatacaccaaagattacgacttaatcggacgttcgcttcacgacgaaattgtggagcctttacgaagtgttttgatcccgggattcgaccaaatcaaacaaacagcacttgaaaacggtgcattgggttcaggaatttcaggttccggtccttctatcttcgctttaagccgtggagaagaaactgcaaaccaaatcgccaaagccatgagcgacgtttacgaaaaaatgaatttaccgtatgaaattcacgtttcgaaaattaatccggatggtgtccgcgtcctttaagacgggacgctttaagcaataggctttaggcaataagcttaaaaccattgcgtaattctttgccctggcttcgacttcgctcagcctgacaaaaaatgcgattaaaaatatttgaataatttaaaggctatgaattgcaaacaagacaaaagcttaaagcttattgcctaaagcttaaagcaaaaaagcctaaagcactaaaaaaatgaaatactacagtttaaaccataacgccccaaaggtttcgtttcaggaagcgataatacaaggactcgccagtgataaaggattatatttccctgaaaaaatcactcctttagacccttcgttttttgatgaaattgaaaatttaagccacgagcacattgcttttgaagcgatcaaacaattcgttggcgatgaaataccggcagacaaattaaaagaaatcattgcggatactttagtttttgattttccggtagtgaaagtcgaagacggaatctactccttagaattattccacggcccaaccatggcgtttaaagacgttggagcacgttttatgtcacgctgtctggggtatttcaacagagacaataaagacgctaaaaacactgttcttgtggccacttccggagatacaggcggagcggttgccagtggttttttaggcgttgacggtgtcgatgtggtgattttatacccgtcaggaaaggtgagcgacatacaggaaaaacaattgactactttaggacaaaatattaaagctcttgaagttgatggtgtttttgacgattgtcaggatatggttaaaaaagcgtttttagacgaaactttagcgcacaaaaacctgacttcggccaattcgattaatattgcgcgctggctgccacaaatgttttattttttctttgcttacaaagctttgaagagccaaaacaaaccgttggttttctcttgcccaagcggtaacttcggaaacatctgcgccggaattatggcaaaaagattaggattgcctattgaacattttgtggcatccaccaacgtaaacgatacggtgccaagattcttagaaaacggaaaatacgacccgaaaccttctaaagcaaccatctccaacgccatggacgttggaaacccaagcaactttatccgcattcaggagttgtacaataatgatttaaaagcttttgaaaaagacttctcttcttatagttatacggatgaagaaacacttgttgctctaaaaaatatttataacacaaacggttatatcgcagaaccacatggtgctgttggttatttaggtttgaaaaaagaactggaaaaacaccctaattccattggtattttcttggaaaccgctcatcctattaagtttttggatgtagttgaacccgctttaggaattacacttcctattcctgctcaaattgagagtgttattaatgaagagaaagtgagtgtgaagattgggagttatgaggagttgaagatgtttttgagctaaaagcttgtccctttacaaaattttaaactacaagttacacaaatatctatgtgtgatttgtggtttttatatttacattagacaagttttaaaaaacgtgcataatatcaatttttttaagatgaacatctatcaaaaagaccatactcaaacgccagaaattttcactcttatcaaagaacatcaaaattccgaagcaatccattatttaaagaaaaaccctgaagaaattcatttaaaaggctggatggatgacactcctttacacactgctgcattaagtggtaattttgaaatggttaaatacctgattaaaaaaaatgcaaatgtaaatgctgaaagaagtggtgtatacgcaactccattatgctgggcagaaaattacgaaattgcaaaatatcttctcgataatggtgcaacgatgaatgataaagaactttttgtcgcgacatctaatgataaagttaaaataattgatttattaataactaatggagcgcaaattgatcaaaatgaacctcaatatttaaaatgtaagtcaattgaatctataatgatctatttaaatcataagattgatctaaatggctgcgataacaacaacagtaatttactccataaattagcttggcttgatttgccaactgtgtttgattttgcatataataacggatgtgaatggagaaaagataatagtcagagaacgccctactatttggcaaaacaaggaaaatgcgaaaatattttaaatcattttagaaaccattatattgaattaatttctaataaagtagaaaatatcgtaaaagaggattatgtctatcaaagaatcttttttataaaacaaagttcgtttaaatcagattggtttattgcattaactaaaaactctaaccttatacgatatctaaaacaagatgataaattaatcgttgatcaaattgtaaatattgatacttcaacaataaggaactttacttttgatgaaagtaaccatgttattgttccaacaggtgataatcaattactcattcttgaacaaaaaacttttaatcttattcgttctgtaaaattaccaaatgatctagttttagatcaaatcacatatcttccttcaaaaagtttatatattggaagttcccaaaattgggaaatagttttactatcaaaagatttcaagataataagcagaactaaagccgaagatggaactctttttccaaaaataaatcattaaataaacaccaataatgactgaaagccagagaagaatctttcaatgctaaaataaaagcttttagagctcaattaagtggagtgagaaaaatagatttttttcttatacagattatcttatctttttgcctgatcctcagattttgcaactgatccaatagaactctaaataataaaacctttgtcaattctatgttttgacaaaggttttattatttagatgatcacctgaagctgaaatgaacttgtttacttaattcaatctgtccgcatgatttcgaacaccgccaaagttattttttagaaattctctaatttgaaattgtgttttattctgagtaacttttttccattcattgaaatcgaaagcatgaatttcagtcgcattcggattggtaacaaaagcgagtcttgcaatagaatatttgtaatactttaattcgtgagaaatatgtcgatccggaacgacgataagtatggtttcccattccaggaaatttttaggaacatctgctctttcatttaatccaagggcttcaaaaaaggcaatgatcttttgatcattaagcttgtcgattttctgatcaactcgtttaatggtgctaataagtttattttcatctttaataacactcataactaatagctgttttttgttttataggttaatttcaatataaaattacaccaaaacaaagtgaattgttaaaagagaggcaatagaatgattctaaattttatagaaagagtttacaggcttgtttatcagaaagaaagcgtgccttagtgatcggagagcataagatcggtttttctttttttggatttattcattacaaacaaaagcaggggtaaggttatcaaaaagaacaatccaacaaggaaaaaagcatctctgtaacttaataaagaagattgtcttaaaacaatactttccataagtcggagtgctttaaacttagcttcgttataagcaaaacctttgctttgaaaatacctgatgtaggcatttatccggtccattgcgatggtgttgtctggggtaacagtcgaaattagctcgtttcggtgtgctgcaaatcgatgagctacataagtattgataatcgaaacgccaaaagaaccgcccaattgccgcatcatattattcaaagcggcgccctgaccaacatctttgtcttctaaagaggagacggccagcatggtaagcggaacagtaagcagagccattcctaatgcacgaaaaatcagagaagttgccacttcagcagcgctggtgtttaaagtcattccggacattctccaattaaaataaataaacaaaagaaatccggctgcgataatcagtaccggtgagacgcctttttgtagtaaggttccgcacatttttaaagccaataatgcaaacagcgctccgggtaacaaaagcaatccggtttgataaggtgaaaagctcaataaacgctgcgcgacaaccggactaatgtagatggaaataaacataccaaatccggttacaaaagttaggactgcagcaatacttaaagatttacttttgaggacccgaagatttactacaggcttttcgatcgtaagttcccaatagataaacaggagcagggttgtaacggcaataaaggtaagcacaacaatatagcgggtttcaaaccagtcttcgacttcgcctctttcgagaaccgtttgcaaagtaccaactcctatggccagtaaagcaatgccggtccagtcgaccttagtgatttcaggttttacaggaggttcctgcagtagaaagtaacatgaaatcatgacaagaattccaatcggaacattgatgaggaatatccagggccaatcgtaattttcggtaatataaccacccaaagttgggccgatagtggggccaatgaagattccggctccaaatatagctccggctgtagattgtttgtcttttgggaaaagctcgaaaaccacaacttgtgagatggataacaaggcaccgcctccaattccctgaaagaacctgaaaaaaacgagcatccaaatgttagacgaatgcccacacataaaagagcagaacgtaaacaaaataacagaaccaatataataattacgccgcccaagattggcgcttagaaagcttgtaatagggattataatcacattggcaatggcgtaagccgtaatcacccacgaggtatcttcaagtgtagcgcccagatttccgctcatgtgggaaagcgcaacatttacaatcgatatgtctatcagttccataatggcggctaatatgacagtcagaataagtagttttcggtttaatggtgtcatagataaatattttataccgatcggtatatttttaattaaaaaaaggacagttgtttttattgactttactctaagtcatcaattatctttttcagtgaaagcataatagtggataaattagacaggtcgcccgttattttagaaatcatgacagcaccctcgataatagcgatgatggttagagcggttttttccggatttatggattcccctttaaattctcccgcagcgatgccttgctcaataaaataaaccagtttttctttccaggcaagaattatactttccactttttttctaagtaccggatgagtatcatctgcttcagtagcggtgttgataatagggcatccaccctgagtgattcttagctcgtaataattagagtagagtcttggataaactaataatttgtctttaaacgtagtttgtttgtcgatttctcgcgtaaaagcatcctgaagtttttttacattgaatttaaaagccgccaaggctacttcgtctttgttttcaaagttaccgtaaatacttccttttgtaaggcctgtcgcttcggtaatatcactcatagaagttccactgtaccctttcatattgaaaataggagcggttttctctataataaattgcttggttctttcggctttactcatggtaattgaaaatttaaaacacaaatatataccgattggtataaaataacaaactttttgaaaaaaaaaacaaagactgcgggatgcatcgtaggacagtacctctctgaaatgtaaaacttaaaacctgaaacttaaaacttgaaacctgaaacctgaaacctgaaacctgaaacctgaaacttcaaacctgaaacctgaaacctgaaacttcaaacctgaaacaaactaaaaaaacaacttcaaaaacttttgtttgattttcataactttgcaaaatgaaagagcaattagaagaacagggttcagaacttggaattagtgatttaaagctgaaaggctttaaggtgtatgaagtaaacggtgacgtgagtaagattccaacgtataaccgtagggatttttacaaaatttgcatcaataccagtaagagttttattcattatgccgacagagggatcgaaacggacggaactatactatttttcggaaatccgcacattccgtattcctgggaaattatttcaccctcgtatgaaggctatgcctgtgtttttacggaggactttctaaaagtaaaagatcgttctgaaagccttcatgaatcgcctttgtttaaaattggcggtacgccaatattttctttatcagctgatcaaaaggtgtttatcgattccttatttcagaaaatgatacaggagcaggaaacagattatgtttttaaagatgacctgattcgtaattatatcaacttgattttgcacgaatctatgaaaatgcagccttcggagaatttctttaaacccagaaatgcctcgtcgcgaattacctccttgtttttggaattgttggaaagacagtttcccatagaaaccaaaaatgagccattagcgctaaaaacacctcaggattatgcgcagagtttggctgttcatgtgaatcatttaaatcgttccgttaaagaagtcaccggaaaaccaacaacggcgcatatttcagaaagaattgttggtgaagccaaagctttgctgcagcatacggattggagtatttcggatatcggatattcgctgggatttgaatatccaagttattttaataattactttaaaaggattacaggaacaattccaaaatcactcagagtgtaaattgtttcatattcttaattttttgtttgattattgttatctcgctgcctctttaccactgtagatttgcattgaaataagtagtattaatcattaatcagttttcaataagctaaataatacttcacaaagcatattcccgctttcatgatttagtttaaactggtgtaaaaaaaacgaataattatgaatacttcagagaatcaatttgttacagctattttgtctaaggaagatttagcttctgtggattgctttagtcttaaatgatttaaggcaggcattgtggtatccggtacttaagggcagcagcttttgtcggatcattttaaaaaagaaatcaatctcaaaaaatcaattttatgtcaacactttatacttcagttattgaagaggggaaaatcccaaatacctatatgactggtgatgtttcgtataaaaagcaaaccagtgctattcatcctgataatacggttataaaagaagtttcttttgaaccgggttcaagatgtaattggcatgttaatccaacactgcaattgtttattgctacaaacgggattggctattttcaggaaaaaggaaaagccatccgattgcttcataaagacgaagtagttacgattctgcccggaatagaacactggtatggagccaccccgttcagttcgttttcgcacatcgctattattacagaaattgataaaggaaccggaatttggctcgatagtgtaaccgatgaagagtattacagttacgggaagtgatttaattagataattagataattagataattagaaaattctgaatgggaaagcctgtgttttttgtaatctgaaacctgaaacttgaaacaaataaaacttgaaacaaataaaactaaaaaacaataaaaacatggaagtaaaaaacataaaagcctttgggacagaggctgcggatgcaccgttgcagacattagacattcagcgcagagcggtattggctcatgatgtagaaatagagattttatattgtggaatttgtcattcggatttgcattccgccagaaacgaatggcacgggacgatttacccaatagttccggggcatgagattgtggggagggtaacaaaagtgggaggtcacgtaaagaatttcaaagtgggcgatttggccggagtaggctgtatggttgattcttgtagagaatgtgagcattgcaaaggcgatttagagcaattttgtgatgccggcagtactttaacttttaattctccggacacgcatttaggcggacaaacctttggagggtattcgcaaagtattgtagtcgatgagaattatgtgctgcatatttctgataaattagatcttgcaggtgttgcaccattgctttgtgcaggtatcacaacctattcaccattaagacactggaatgtaggttccgggcaaaaagtggggattgttggtattggcggtctagggcatatgggaatcaaattggcgaaagcaatgggggctcatgtggtagtttttacaacttcattgtctaaaaccgaagatgcaaaacgtctaggggcggatgaggtagtactgtcgacggatcctgagaaaatggctaaatacactaaaagtctgaattttattttggactgtgtgtcggcagaacacaatattgatgcctatttaaatctgttaaaagtggatggaacgctcactttggttggtgctccaatggagcctcttccggtaacttcgttcagtcttttattgggaagaagaagttttgcgggttctgctattggcggaatcaaagaaactcaggaaatgcttgatttttgtgctgaacacaatattactgccgatattgaattaattggcgtaaacgaagtaaatgacgcctatgaaaggctgttaaaaggaaatattaagtatcgttttgtaattgatatggcttctttatagctttttttaaggtgctgaggtactaaggttctgaggtgctaagttttgttgagacggtataacttttttgaagtggctaaggtactaaggttctgaggtgctaagttttgttgagacggtataacttttttgaagtggctaaggtactaaggtgctgaggtgctaagttttgttgaaacgatgtaacctggtgtaaaacaataaaccccttaatgaatttaattcttaaggggtttgttgttttttggagagaatgggtgatgagttgaagtgttaattatgctttagtttttaggatggaataggataaattatcatgaattttcatgttcactgaagaggtatttgtttgagataaaatagcgttgaacaaatggggttgttgagaataaaaaggactgttttttgatactgacagtttgtcttgttgtgttttgtttttgtttgtaattgttttgtttccagtgttttggatttattgtgttaaattgtaactttatagtagttttgagaccgaaacgatttagatgtgaaacaaaaaagttgaaagaattttaatttgaactctaatttcttcggagaaaaagcattcttttgaggaagaataatgcttaaggttttaaaatttaaattttgtcaaagggaacaatatggcttcaaaataaattccgttgaatgtggttttaattgcttgttgatgagttttttaagtgatgctaattgcagaagctttgagaggaagactattgctttaatagtattgcttttttttatttaatagttgcaatagtggtttttagatgtaaagtgtaagttttaattaatgattataacttgtttaataatagtaatctatgttttgtaattgtggtttcaaaaaataatattcaattcctaacaacatcgttttttagtttaagcaaagaatgtaaaagaaaaatacacttctctcacatgactgctgtttgataaggaaatgggaaacttttatcttaattagtagaatagggggttttggttcgaaggaataaattttagaataaaatgttaattgttgttaaagttgaccaaatttttgaatcggcgggattgtttttttaagaaagtaattttgatatacaggggattttgttaatttttttgattcgtccgtctttttttagaagcatcaaattcaataattcagtttttcaattgaaataaatactatttttgtgtcgtgaaatggataacaatcatattatcgatttatttaatggcgctttccaatatgccttgtgcagatatggaaatcaatagtgctgctcacaaaacagctcagttttcttctgaagccaatcacacacacgataaagacaatgatttatgctcgcctttctgtgcgtgcaattgttgtggagcgcaggttttaagttatcagacttttgtaagctttgattttcctgtcacacattcccttatttcaagtccgttacccaattacatttctgtttttgcttctaatttctacggaagtatttggcagccccctcaaatagcataatgatgcccacccgataagtcggaatgtgggttagagcgttgcggattttccgcagtatttaaataggcaacactttgcctcatttctcacatcattataccatttaaatgttagataaaatcatacagtttagtataaagaataagttcgttatactattattaacccttgtattaatagcctggggaagctattcgatcaaacaattacccttagatgctttgcctgacgtaaccaacaatcaggtgcagattattaccacagcacctactttggccagtcaggaagtcgaacaactcattacatatcctttagaacaggctgtaaagactgttccggatattatagaactccgcagtatttcacgtttcggattatcagtagttacggtcgttttcgaggacgatgtgaacatctattgggccagagagcaaatatttcaacgtcttaaacaggccgaagagaatatccctgcttatgccggttcccccgaattagccccaatcagtaccggtttaggagaaatctatcagtacgatgtctatgccaagaaaggttatgaagacaaatacgatgctattaaactacgtaccattcaggattggatcattatcccgcaattgcagggtatcaaaggcgtagccgatgttagtacctggggagggaaactaaagcaatatgaaatcgccgtaaatccaaatacactgaacagtttgggcgttacgattacagagatttttgatgcactcgaaaaaaacaatcaaaatacaggaggtgcctatatcgaaaaagaccagtttgcgtacttcattcggggtgttggtatggcgaaaggaaccaaagatttaggaaatgtagtagtgaaaaaccgaaatggttcgcctgttttggttcgtgatgtagccgaagttcgcgaaggtgttgccttgcgttacggagcttcaacgaaagacggaaaaggggaaattgtttccggaatggttttgatgttaaaaggagaaaattccagtgcggtggtcaatagaattcatgaaagaatgattcagatcaataaaagtctgcccgaaggagtcgttgccgaggcttttatcgatagagggaagttggtagacagcgctattggaaccgtttcaaagaacttattagaaggagctttgatcgttatttttgtgctgatcttatttctggggaatcttcgtgccggtttaattgtagcttcggttattccactggccatgctttttgccgttattttaatgaatgctttcggcgtaagcggaaatctgatgagtcttggggcaatcgactttggaatcatcgtggacggcgctgtaattattgtggaagccaccatgcaccacttgcagcagctcaaacgcaagaaagcgttaacgcaaaacgaaatggatgctgaagtgtacaattcagcttcgaaaatcagaaacagtgctgcttttggggaaattattattctgatcgtgtatctgccaattcttgctttagttggaaccgaaggcaagatgtttaaacctatggcaatgacagtaggttttgcggttgctggagcttttattctttctttgacttacgtaccgatgatgagtgcgatgttcttgtctaaaagtactgaacacaaagaaaatttcagcgacagaatgatggcatggctggaagctgtttatacaccgtttttgaaaaaagcactacagtttaaaaaggtagttttaggtgtatcactgggtttatttgcccttggtttagttgttttcaattcaatgggaggagagtttataccaactatcgaagaaggcgatttggctataaatgcaaccatcatgaccggaagttcgttaacccagatggtggaaactactacgaaatacgaacagatcttaaaagctaaatttcccgagatcaaaaccatcgtaaccaaaattggaagtggggaaattccaaccgatccgatgcctatcgaaagtggtgatttgatcattgttttgaaagataaaaaagaatggaaaggcaaatatgacaactgggaagatttagccaatgccatgaaaaaagaaatggaagtcattccaggagccaatatcgagatctctcagcctattcagatgcgttttaacgaattaatgaccggaagccgaagtgatatagccattaagatttttggagacgatctggagattctggacgctaaagcaacagagttaatttcgaaaattaaaagtattgaaggaataggcgatttaaaagctgataaagtgaccggcttaccgcaaattacggtgaaatacgactacaataagatcgctttatacggattgaatatttcagatatcaatcaaattatacgttcctcttttgcgggagaaagtgccggaaaaatctatgacgaaagcaaaaggtttgatgtagtagtgcgaatgaatgaaaacaatcgtgccgatattacagacgtgagtaatttgttcattccgttgcctaacggacagcaggtaccgctttcgcaagtggctacagtcgagtacgaacaagggccggtacaggtaatccgtgaaaacggaaaacgcagaatcacggttggactaaacgttcgtggccgtgacataaaaagtgtggtagaggaaattcagcaaaagctggacaaagactacaaacttccggccgggtattatgtaacctatggaggtcaatttgagaatttaatcgaagcaaccaaacgactatcggtagcgcttccaatcgctttaggattgatattggtgttgctgtattttacttttaagagtttcaagcaggcgggattgatttttacagccattccattatcagcaattgggggagtttttgcactctggatgcgtggaatgccgtttagtatttcggcgggtattggtttcattgctttgtttggaattgcggttttaaacggaattgtattgatttcgtatttcaatcaactcaaaaaagagggagttcttgatccgttgcaaagagttttaatcgggaccaaaactagattgcgtccggttttaatgactgctgccgtagcttcgttaggattcttgccaatggcattgtctacaagcgggggagcagaggtacaaaaacctttagcaaccgttgtaattggaggattagtttcagcaactttactgacattaattgttttaccaattctgtatttattgttagagaagaagtttaaggataaaaaagataattagattatttgataatgaagtaattaggtgtagggtgattactgattagtgtaaaatgatttctcttgcagattcagctttaaaagtaaaaaccagcaaaatctgcgagaaacaaaaaatataaaaatgaaaaacatactaaagcatataaacacaagctcctttgcgcaccttgcgaaagatggattgcgcgctttgcggttaaacaagctggtactagcattcttgtttgcaacgacattaacaaccgcacagcaaaaaatcagtctcgaaaaagcaatcgaactggcaaaatcaaacaacatcgatttgaagattgccgataaggaaattgaaaaacaaaccgttttgaaaaagacggcatttcaggcagatccgcttcaggtgcaataccagggcgggcaattcaatagtgccgattacgaccataatgtttccgtacagcagttttttccattgggaaatatcacaaaagccaatagacaattgcaggaagaactggcaaaactggccgaaaaacgaaaagcgttgtcgacttatgaagtagaaaaagccgttactcttgcttattatcaatacctgtacggcgtttccattcaaaagctaaactcagaactgaatgaaatttacaccaaattcctgaagaatgctgagcttcgttttaaaaccggagaaagcggaaatattgaagtcataagtgcaaaggcaaaagtaaaagagattgaaactcaaaaagcacaattagaatttgatttggcgatttaccaaaagcagctgcagttttttgtgcaaacggatgagaatgtcattcccgatgctcaaacggccttgcaatactcgatggtaaaagaagaaggaacctcgaaagcagagactttaatgaccgatttttatcagcagcaaatttcggtgtatcaaaaagaagtcaatacacacaaagccatgcgaacaccaaaagttggattgggctattttgcacaaaccatcaacacgcaatccttgtttcagggttttacagcgggattgcagattccgttgtttggaggggtaaatacagcaaaagctaaggcttcggcaatcagcatttcgcaatcgcaactggctttggataaaaataagctgacgctgaatctgcaaaaacaggaattgcaaaacaatttcgagaagcagcaaaaagcaatggattattttcaaaaagaaggattacagtatgccgatcagattattagtacggcccagaaaagttatgccaatggcgatttgagttattggtcgtacatcagtttcttaaatcaggcaattgatattaagaaacaatacactgaggccacacacaactttaatcagagcgcaatcgaattgcaatttccaaccatcaaaaacaactaaaatgaaacagattaataataatacaacagtaaaaagcacaaaggttttatcgcaaagaaagttcgtttgtttgggattaatggccgcttcgataatggttttggtatcctgtggtcaaaagaaaacagaagaagctccggaggaagaaaaatcgcaaacagaagttgctttaaacgaagcgcaatataaaacggttgggattgaaacaggtttggtagaaaacagaaaccttaataaagtcattaaagcgaatggttatactaccgttccaccacaaaattccgccgaagtttcgactttaataggaggaacagtcaaagatatttttgttttggaaggaacgtacgttaacaaaggaaaagtattggcgaccattcaaaacctggaagtaatcgaaatgcaggaagaataccattcggctgtagccaatattgagtatctgcaattggaatacaaccgtcagaaaacgctgagcgatgaaaatgtaaatccaaggaaaacatttcaggaagtaaaatcaaaattggcagcagaaaaagcccgtgcacaggctgcgaagaacaaattggaagcgttgcatgtcagtaccaaaggaagcacttcgttagtcccggttgtggcgccaatcaatggttatgtagggaagataagtattgcaaaaggagcttatgctcaaaccggagttgttttatttgaagtggtcgataacagtcagatgcacctggatctgaacgtgtatgaaaaagatctggggtcgatttcaattggccaggtgatagattttgttttaaccaatcagtccaacaaatccattaaagggaagattttcggaataaataagtctttttcaaacgaaagtaaaaccgttgcagtacatgctaaaatcgaatctgctgatgccaaaggactgattccggggatgtacgtttcggctaacatcaatattaccaatgctactgttcctgcgttaccaaaagatgccgtagttcgaaatgccgataaatattttgtttatgtggaagaagaagcacatgaggaaaagaaaacgcctgaaaaaggaaatcatgaaaaagaagttcattttagagcagtggaagtcattccgggcactacagatttgggctttacagaaataaaatttgtagaaaatgttgatccaaatgcaaaaatcgtaacgaaaggagctttctatttgctttcggctatgaaaggtgggggagaacatgatcattaaattttgatcgggacaaaggtttagaggtttttgtagagacgtataacagtgcattcctgaataacctcttgactttggtccaatgtcataaagttaagtgatttaagatttttgattaatgatttttgatttcagatgtatgaaatctagagatagataatagtactaatgactaggtcagaaatctgcaatcgttaatcttcaatctaaaatctcttttctatgcctttgtctaaaaactattaatacaaaatccgtaaatttagaacattattgaaacaaagtttaaactcgaaactttgaaacctaaaactttaaatttctcatggaacatctacataaagaagaaaagattaaaaagaataaaataaatcaacccggttcctgctgctcacatgacgagcctgtacattcagacgatgacgggcacgatcacggtcatagtgcgaatagcggatggtttagaatgtttttaccggccattatttcctttgttttattgctgattggaattggattcgatcagtatttcgaacaaaattggttttctggccctgttagaatcgcctggtatgttattgcttatttgccggtaggattccccgttttaaaggaagcttacgaaagcatcagaaaaggcgacgtattttcggagtttttcctgatgagtatcgccaccatcggagcatttgccattggagaatttccggaaggtgttgctgtgatgttgttttataccattggtgagaactttcagggattggcagtcagtcgtgccaaatcaaacattaaaagcttactggaccagcgtcctgatgaggtaagtgttttggaaaataatgttgcgactaaagttaaagctaccgatgttgccattggagcgattgtgcagctgaaagcaggggaaaaactgggactggacggagaattactttccgattcggcttcctttaatactgcagcacttacaggagaaagcaaaccggacaccaaagtaaaaggagaagctgttttggccggaatgattaacggaagtaccattgcattggtaaaagtaaccgcagcgtataacgacagtaaattgtctaagattctggaaatggttcagaatgccgttactaaaaaagctcctgcagaattattcattcgaaaatttgctaaaatttatacgcccattgtagtttatctggcaattgccatttgcttactgcccatgctttttgtatccgactatgtgtttagtgactggttgtaccgagcattggtttttctggtaatttcgtgtccttgtgctttggtgatcagcattccgctaggttattttggtggtatcggagcagcgagtaagaacggtatcctgtttaaaggaagtaatttcttagacagtatatcaaccattcagaatgttgtgatggacaaaacaggcacaatgaccgaaggtgtttttaaggttcaggaagtaattattcaggagggttttgacaaagacgaaattttaaaactggtcaatgtacttgaaagtcagagtacacaccccgttgcgactgccattcacaattatgtagggcaaattgattcctcgataacactgaaaaacgtcgaggagatttccggacacggattaaaagctgaaatagacggaaaagaactgcacgtagggaattttaaactgatggataaattcagtattgcatacgatgttgatcccaatgcggtggtttatacgaccattgccattgcttacaacaataagtttgcaggttatttaacgattgccgatgaaattaaagcagatgcgcaagaggcggtaaccaaattgaaagctctcggagttaaagtaaccatgctgagcggtgacaaaaccaatgtagtgcagtttgttgccaaaacgttaggcattacaaacgcttttggagatttacttcccgaagataaggtgaatcaactaaacgaaattaaagccaaaaacgaaacggtagcttttgtgggtgatggtgtaaacgatgctccggtaattgctttaagtacggttggaatcgcgatgggcgggttgggcagtgatgccacgatcgaaactgccgatgtggtcattcaggacgataaaccaagcaagattccgatggcgataaacattgggaaacaaaccaaaaaaatcgtctggcaaaatattactttggctttcgttgtaaaagctgccgtacttatcttgggtgccggcggactagcaaccatgtgggaagctgtttttgctgatgttggagtagctttactggccatattgaatgccgtgaggattcagaagatgaaattttaatagaaagaaaccgtttcagagtttaaactgaaacggttttatttttaatactttattctcatatggaataaccagagcggtataaagactattaaagaaatttatttttttaaatgtgttggttcctgaatttctccattaccaaaggaccagttttccaaaccgttattttctaataaaacaataatcacgttattaatgagaatcgctgttgttgcggcaattcttgtagcaatttggtggtataatttctttttttgttctactgttcgaccttgtcctgcggtgatctgaacatatacaatttcttcagaatgcgaaataccaagataactttcgggatattttatctgatgctgttctaattcttcaattacatgaaaataatcagcacttggaatatgaaattctgctattaaagattgatgaatcgcttctgaaatattgtttttggtttctaatgaaagcttcttaggtaaactgattcggacaaatggcattttttagattttgagttttgtataaaaataaaaaaaatagaggaggaggagcagacaaatgtttaggaaaacttcaattcaactcacgctgtgcgaagtctcccgacttcgtacccacttaaatatatttaagaatatattggtattctttcctatcgatgtcactacgaagtcaggaaactttgcagagcggggttcccgaatcatcaggtgcaggaggatctggatctccaccgcccagatcaaccggaatactttggtcttcgctatatctgtactgaaatcctcccagataatctgtatgagttgtaccgctggcctcttttacaattttcttcagtttttgccccgctgcgttgtaaatatactcaattgatctagggcttgcaaaggtaatttttgtgtaccgctatttcaggactagacagttcagggtattgcggatcaataggaacataagctcctcccgattttaacacacccagtatcgacacaatcatccactcacttcgctccaattgtatccctatcagatcatccggctgaatgttgtaattttctattaggtaatgcgccagctgattggatcgctcattaagctccctgtaagtcagttctgtatcttcaaagactatggcgatgttatccggtgtctttgcagcctgttcttcaaacaagtctacaattgtcttgtccttcggataggctactgctgtatcgttgaaagtgaacaatagttcgtgctcttcttcttttgtgaaaatccaatcaaaagtcggaaatgaatcatttgttatttcgcgcttattgattattctaaatgctgaattcgtgatagattcctgaaatttatcgtctgttactacttcatcatccacaatcaaactgcagatttctgaatctttattatacaactctttcgccaataataaattagaaacagcagaggcttctacactcagatgtgttacgctttctttttccagaaactctaataatgattcattatgctgaagcaattccggaaccaagacaagctcagatccaaacaatagcgtcccataaatttccaatatcgaaggggttctttgaaggaaagttgcccatttgttactacttccatagtcaaataaggtgctatccattttaaataaccctactacatcactatgacgaatgagcaaggatttttgctcgtcgacagtatcaaaattactaatgatggtcgctacctggtctgctgaaacctgtatctccgggtttacttcagatcttactaccagatccgtcctgtcatattgtctttttatttttctttgttgcgtattttcttcttccgttactatttttacctgcctcttatcaatttgcaagatgacatcataacgatatttagtcaattcattctctattgttcttatcttatcactaacagacacctctacgatgttcttttcggttataataaggtcctcaaaatatcctttcgacacaaaaaaatctgacgaaaaatcagtcttcgtagtatagcctttatccttgttatcttgtttaaattgatgcaagtcctctagcatttcagacttcttattgatgtccataatatcaccaataaagatttttccatcttctttaagcaacttaactccttcctttatcaccttaagaaaataattatgcccgtgaaaattttggattacactatttataatgatgagatcaaagtccttctcttccagctctcctatttcatgcgctaccagttgctttaatttcacatttttaattccgttctcagcaatcattttttcagttccggagagaataatcggagataagtctgttccgtaatacagggcaacttcaggagcaatcttacttaaggttattccggaagaacatcctatttccagtactctcatgtcagaatgaagactattcctgagcttattataggcgttcatggaatattcctccatctctatatccgaaatggcttctcctgtataactacttatccatcccccacttgttatttgatcatcagcccttctccccacatggtcccaaagttcttggctcatcattatattatcacgatactccttctccgcttttacatcattgctgtctacacataaataatttttcagagtagctgagctccattgaagcctatttgactgttctataaattccttctcaatgattaatgtttggatttcaaaatcagaaatcattgatgctaaatggttttcgtgggctgtcggcattaaaactaagtaggatcctccagcttttaacactcctaacctggaagcgatgctgtagaatccattatttaatactaatcctatcttttcttcctttttgatagcagcttcttccagcaaaaaatgagcaacctgatttgcgcatcgatttaactcctcgtagctataactttcattaccacatcgcaacgctgtttttaaactattccttttaacctgttcatgaaactgacttacaatcgtagtattagaaacagctgtaaaaacttgtttatcaagcaacttcaactctgctttttcctgaaccgacagatagtccagagatccgatctcctgagcagggtttgttaaggctaagctcgaaaacgttttaaaatgttttataaacctctctattattgcaggtttgtagagatcctgattgtactcaattaaaaatgcgatataatcctcgttctcctgaaactcaaatttaatatcgtagatactcgtccctgttctaatctcaactatatcatcaatgttggattcagagattgatatctccttcattttttcatccgtattctgtagcaccaccaaaatatcaaatatagcacttctactagtttgtctactttgtcctatatcttccactaagcgatcaaaaggataggcttgatgggcataagcatctaatatggtatgctttgcgtttcgaaaaatatcttctaaattatctttttcatctatccgggttcttaatactagcgtatttacataaaacccgatttggttttccaattccagtaaatttcttcccgcaacaggggttcctacaataagatcatcctgagccgtttccctgcgtaaaaaagctttcagcactgatacaaggctcataaacagagttcctgatctttgcaatgcataattcttaaatctgtttgttaaatctttatctaagtaagtagcaactgttcttcctttgtgagttttcacattaggccgcatgttggcacctggtaaatccaagattcccagtttaccggataatttatctaaccaatattttttataaactttaaatgaatcattctcaatctggtctaactgccaacaagcataatccttatactgaatcttcaaagaaggcaaattttgattgtttccttccatgtatttttcataatagaaaaacacatcgctatagagaattttcattgaccagccatcactaataatatggtgcaggttgaaatagaatacgtattcattatcagctgtctgaagcagagcagcccgtaacaaaggtccgtttttcaggtcaaatgccttataggaatccgtaccaataaaacttaagactttctcatgcttaaactcctcttcccgataatctcgataacctatttcaaaatctaaatcctccctgcttaatatccactgcctaatttcaccttcttcattttctctaaaaaccgttcgaagcatttcatgccgctctaaggtagcctctatagcctgcttaaagtaacttatattaaggtccttattcaaatgaatatgcgtaggcatattgtacgcaacagacccatctttgaattgacttaatatccagattctacgttgggcatcagaaattgggtaagaagattgtacttttgcagcttcaatagtttgaattcccgacagactatcttttaacaaaagaataatttcagctttattatcaactagtgcttgtttctcttcaggcgttaattttttcaaatcacctctgactctcaaattttcaaaagtatcatccagagctattgcgatctgctttgcctttaatttagtcaataatgaaagtacttcggaatcatataacatagttcttattaattttgtgcaattccggtcctatactttattttacttaaggtttttaaaactcatagaaacgcaaatagttctactacagggtttcttatttactttcttcctattttttgttttcaccaaatatgaagagcctttaaataggtatcattttattaaacaataccatagaataagtcggaatccattatttcaattacaattcgtaaatttcgacttctattgctttttgcaaaagttcttttgtctataaataaggtcttgcacttagataatactatctaaaaactcctgtgcaactgcattaacactatgctctattaaaacctggagtactacaaaaaccctatttaattgtatatctattttttcttttcaagaaattaaatttgatagactgtggctaagttagataaaagcaaagtgaaaaacaacaaattttttaataataatatttttacatgcagcaactatatataggtagtatttgattaactatcccaatccatatgtaaaatatctccaacctaccttatgccttgctattagaaaaaacaacaatatttaaccccactgaaattcgtcgcgtgatcaggcaaaaatgatttttttaaggtctaaagttatcggcacaatagcatttttaattggacaataccaatcttcaaccttacaacgaaaagaaatactaagccacattactatttgtcacgatgcagggtctgcctattgacttttgtccccgagaagcatctcctgaaacattttacccttacaaaaaaaactttcacaaattacctatatacttagatttaaattttgtttttaatttgaataattgtaacattgtaccttaatgatatccttataagtgcgtaaaactttataaaaaaataaagtcttatgacaatgtaagagtatataacaagtgttcatccgactggtttaattgtatactcttcgatcctatcgttattggtttgctgaaaaaacaaaatagaacaccgatactgggtgacaccagcaggtacatttgatttgttttttggattttatcgattaataatgaaattatataaaatcgatgataacagattgaccatggcggctctttctattctattaaaaaatataaaatgatatttaaaaaaaatatgcaagtttttttattgcactttgctggtggtagttccaattcattcaattttttaaaaccctttttacccataaattttgatttccatctgttagaattaccaggccggggaaaaagaattaaggaaaacttattatctactcaatcagaagcagttgatgacttactacatcaaattaattcattgagaaatgataaaccttatatcatttttggtcatagcatgggggcacaattgggacttatggtaaccaaaaaaatggaagaactgggtgattccccaaaaaaactcattgtagcaggaaatgccggtccgggaacaggcgatgaagacagatgtcgatctacaataagtgacaaggaattaaaagaagaactaatcagtttaggcggtgttcccaccgaagtattggagaacgaggaactattcaattttttctcccccatcatgaggtctgactttgaaatattagaaaaaagccctcgcttagactccaattttaaagtaaatacacctattgttgcggtaatgggagatgaagaagaaacagcaaaagatattgaaaactggagacatttcacctctattgcattaaagtcccatttacttgaaggtaatcatttttttatacacgatcacccggcagaattagtacgaatcataacaaatctagatgattgatctctggtatcttgacactgtaaacgttagtcaaattgatatggagagtatgcttaagtcacttccaaataacatgcacaaagaaattatgcgatttcaaaatcatcaagataggcgattaaaattgtatagtaaattaatggtgaagaaatattttgaagtttcaaacagaacattttcttggtcaaattggcaaatatctcccggaggaaagcctttttattccggaggaaaaaaatttaatatttctcattccggtagctttgtaactgtagcattttcagataaagaaattggaatagacattgaaaaatgctccgattttgatatctctactgtattagactatcttcatgttcaggagaaagaattcattcttgacgctaatgattccagtgacgccttctttaccgtttggacccgcaaggaagcttatttaaaagcaaaaggaattggaattgtagaaggcttacatcatgaaaactgtctggaaccatcaataggctttgaaaacaaatggtttacaacatcgctatcgattgcggcaaattataaattagcactatgttctcaaataccaaatattcaaattaataaactagaattagatccaaccctcttttataatgaataaaatatccgtaaaatttctttttccgttagttgctttgataatgctagtagtagtgttggatcgaaaagtttatatggtacctccgctgggtacttttctaaatccgtttataggtgctgttcaaaatgaacagacttctaacagcaataaagacataagtatcaaagtcagccagaaaactgaaataattttcgatgacagagctgttcctcacatatttgcagccaatcaaaaggatatgttttttgcacaaggttatgtttgcgcatctgatcggttatggcaaatggattttttgtcctatgtgtctgccggaagaatgtgtgaaattttggggaaagaattctttgtccacgaccgaaaaacaagaagagacggaatccttacttcggctataaacaccttaaaacacatcgaaaaggaccaggaaacaaaaagagcactagacagttatacggccggcgtaaatgcttggatcaacagtttgtcatatgctgatctacctattgaatataaacttatggattattctccggagccatggaccaatttaaaatctgttttaatcatgaagtatatgtcagccaatttatcgggcttcgaagaagatgtttcggcttcttacttacagatgattcttggatcaaaagaatacaataaactgtttccggattactatttaaagaaaactaaagaaaagtttgctattcagcgaatttttgactccctgccggagaatgaatatattgattattcatttcttgcgtcggcttcacaaatatcctcaagtgcttacaatcccaatttagggagtaatagttgggccgttgggcctaaaaaaagcaaatcgggattcgccatgttgtgcaatgacccacacctaaacctttcgtttccggcagtttggtatgaactacaattaaagtcgaatgaacaaaatgtctacgggtattcaataccgggggttccgggggtggtaataggatttaatgaaaaaatttcctggggattaacaaatggttctgatgatgtacgtgattattacaaactggaggttaaagacaactattcttattacaagtatgatggtaaatgggtaaaaacggacagtgttgtcgaagaaatcaaaattagaggtgataaaccatttttagacaccgtttactacaccaaacatggacctataccttctgattttcgcgagggagagccggagctagaaggctatgctttaaattggaccttgcaagatccttctaatgaaattttagctcttatcaagctgaacaaagcaacaaaatatacgcaatttaagagcgccattcaatattacaaatgcccttcgcaaaatttcacttatgccgatgttgaagggaatatctcgattcaccatcaaggaaaaattcttgcaaaaaaatggaagaatcaaggtaagtttgtcatggacggaaccagatcggatcagttttctacagcggtattagacaagttaccttattcttacaatccagatcagggctatgtgttttcagcaaacaataatccttataagatcagtaattcacccctaatttatggccactatctggaattaagagccaataaaattgactcctatttgtccgccaaagaaaaactgtctgtcgaagacatgaaatcaatgcaactggataatacgaacagtctggcagagttagcgattcctgttttattaaaaagaatgccttcaggtaaaaacaaatatttaaaagaattttctctttggaattgcaagtatgataaagattctaacctagcaccattatttgagctttggtggactaagattaaaaataatacatgggatgaattactccgatataagatgactaaactggttccggatgatttggtattactagatatgatttctaacgatccaaataataaatatttcgatctgctttcgaccgaaaaaacagaaacggcttctgatattattgctatttcatttaatcaaatgctgaatgataccaccaaacgttcgaactggggaaatacaaataaaatagatatcatgcatttgtccaatattgaatatttcagcaagaagggcttaccacaaggaggacatccacaagcattaaatgccatttctaaaagatgggggccttctttaagaatgattgtggaaatgaaaaaaagacctaaaggatatgctgtttatgccggaggacaatcaggaaatccgtcatcggatgaatacgatcacttcgttgacacctggagaaatggtcagtattatgaactcaaattctttggtaatttaatcgaaggaaatgcagaagcaaagtataaatggtctttaaaataaattaataatgaaaaaattaataaccttcgcaatactatttagtgttttaatcttcatggggatgttagatttctttccttggtggagtttttcggtgccaatgtttgtattaggggcaacactcccctttaaaaaatggaatatttcctcttttgtatggggctttatatcgggttttatggcgtggtttttatcaactatctatttcgagatcatttatgaaggtgaaataatgtcgtctgtggctaaactcatgtcattacatatttatttattgcatctcataataggtcttattggaggtgttttaacaggattgggagtgtactccggatatctatttagaaacggaagagaggttcttgaattgcaactcacaaaatccgaatgatgaataacgtttatcgtactggctgcttttgtgatggaaaaacaccttcttccataaaacacatcacgccaaaatccaagtaccctttcactttcaatggatcgtttctattgaaaatgcaggagatttacttttttaattgataatggtttaaaataatatctaaaatcacatttatggaaattggaattgacacttttgtttcgtctggcggagggacaattgtggaaagagatgaacgagcaattgaaaacttacttgagcgaataaagtttgcagacgagctaggctttgatttatacggaattggtgaacaccatggtaaagacaagctggattcagcacctgtagtattgatggcggcggcggcatcgattaccaatagaatacgaattacaagtgcagtaaccggattaagtacggttgatcctgtccgattgtttcaagagtttgcaacactggatctagtatcaaaaggacgtgccgaaattatcgctggtcgaggagcttctcttgatgcatttccattatttggactaaatatcaaggattctgcagaattgtttacagaaaaacttgaacttttgcttaaaattcgagacaatgataccattacctggtcgggtaaatttcgaccttctttagacaatgtaagtgtctacccgcgccccttacaagcttctctaccaatatggcatgctgctttgcgaacgccagcctcttttattcgtgcaggagagcttggcctacccttaatggtggctatcattgatggtcaaatagaccagataattcctttagtggagctctaccgcgaagccggagaggatgccggctttagtaaagatcaattaaaagttggattacactctatgggatatgtcgcgaataccacagaggaagcgattaaagatttctatcctggttggtctaattctatgagtaaaatgcatggtttaccaaagagtctttctcgatttgaaatcgatttgaaatcaacgggaagtgccttattggtaggaaatccagaagaggttgcagcaaaaattctccatttatcagaagcacttggcgggatatccagattttgttttcaattggattatgcctcgctaccccacgaaaaactattacaatgcattgaggtaattggaaacaaagttattccgatagtaaaacaggagtcccctgtaatctattaagtctggttttatcctagcagtattgaccagcaaatattaaggtatagttagtttatttttttgtcaattattattaatcaatataatttctatagttatgaaccctaaggcatcaatcacttacttaattttaattattattcctttgttcttaggttgccgtggacctataaaagaagaaaacatagacaatgcgggagcaagcactttttcctcagagcctggtgcgaatgaagaatatagtattgataccaaaaaaagtgttgtaacatggaaaggctctatgttaattggttctgacaccaatacaggatacgtctctatatcagaaggagaactgataatcaaaaacggtcagcttatagatggtaccgctgaaatagacatgaatacaattgcagataaaagacataaaagtgataatgaacttgttgaacatttaaaatcgtctgatttttttgatgttcaaaaattccccacttctaccattacagctatcaaggttacatcaataaatggtgagaataaaaatgttacaggaaacctaacgataaaaggtattacaaatcctgtctcttttccggctaaaattgaagttaaagacggaattgtccagatgaatggcaagttggtcattgaccggacaaaatggaatgtccgctataaatcagggaaattctttgatcttttacctgatcaaacgatgtcggattctattgaattcactgtaaatattatcgcaaaaaattaaatcccatacctaatttacacgagataaacagctgcaaaaaatgcttctgttcactcccatgtaaaggctaacaattaatcccgcattttgtggctcagtgctattaaaatgggcgataaatacttctccctccgatcttttaaaataaaaaatcggaggaacaagtagaacttacttactagcttttttaattattgacaagctccggcagttcaaaatattcaatagttttttcaccaaacaaacgctccgcagttatcccaatggccctgcacttttcaattaaaagattggattcaactattggtcttgattcgttagtatatttaatagaactgataaattctaaccaaggttcaagccccattgcataaacaaagacatcttttggattgaattgatttacaataaacattccttcattacaatcgctaccggccaatcttctggattgatctttgtcgcgatctgcttttttaggtaaaagtggtccatacaaccaagacaatggagcgccatcacattccattcctaggaacaacacatcgacatcacccattatgttatgtactctttcatataatttaggctctatattttgagaatctgccgcaaataatactttgtatttattatgcaaattaacatgaacacacaacttagatcttacatctaggtcacagtgttctcctaaaaaaggaagcccggtaattacacatttatccaactctacggactccatgtcatccaattctatcacattatcaaatcctatattcttgaacatcaatttcaagtttggatcctgtaaatttccttttcctgaagagggaactactatgttctttatcctgtgtcttagttgaagtaaagtttcaaacaaaacatgatcctgatgattatgagtgattaaaacataatcgatttcgtccgggagatgttccgtcgtaaaacggggtacatcgttttcataaccatcatagctaaccacaggatcaaccaaaagtgaaatctcgtttgtctccactagtacacaggcatggccaaaatatcttgttctgattccgttccccgtatactgttcatattgtttaggagcttctaaagtaaaaaagctatcaaataactcttcttgtccctcttttatttgcaaaattttcttgatttcagcataatccccgggagttcttttcattttgaacaactgatctataacagaatgactaaaaggaatttctgcatgaatagttatttcatcatcgagtctgggtgtactcagtacaaaacttctctgcgtatcagattctaccaactgcagcgcaattgtttgggccgaatcatcatagaattcactcctatacagtagtgcttcgaaaaatctaaaatttggttggtcatttaaatcatagtataattcaacataaccttttaaaatctcagggaccttttcgtataaaggcgtaagagaatatccttttgcgtgtacttgcaaaagttcattcaactcattcactgcatctgccagattcaacagatgcgctcttttatctcttatttgatctgctaaatcttttatttcatccacccttttaccatcataatcaataaaaggtcctcccaacatttcaggtttcttaacagctgctgcatgaatctttggatttttaacataagaatccatgatttttaaatgcctgtcctttacattcattgccgctgtagctggggaaattaaatgcgaccatgcataccatcggtcaaacaacgcttcaagcgccacattcggttttaaataatacttgttttgagtagcctccattacaattttggtttaattttatttgaattcaatttatactattttttgacaactcgtcagatttttttgttgtttttagcaacaaaaatttttcttccccttaaagagaaagtaagagtagcaacaaaaatagcacgaaactttaacgtgactattcatgtgccgccctaaattaacctttattagatcagataatgggactgtactttttagccataccaacgagtacctgtcttgttccttcatatggttcacgcccatgggtatataacatattatcaagcaagagtagatcttgctttttccagtcgaatgtaaactttgtcctttcgtagacatcacggattacagtgagagcctctacatctatgggagttccatctccaaaaaatgtgttcctggggatattctcttctcccaatagctcaatcaaaccttcttgcagttctatatccagactactcaagtggaacaaatgggcctgattaaaccacaatttttcatttgtaacagggtgtaatatggatgcctggttgacttgctttgttctcaaaccattagcagtccactgataatcaatacgattgtctttacaaaatttttcaacctctgcttttgtgtcagtttgaaatacttcttgccaaggcaaatccatatctgagtagtttcgaacatacataatttttttccgttcaaattcttcccgaatttctttaggaatctcattataggcaacacgactgtctgaaataggggtattccccatcttagcagccggaaccatacaaacaaaacctattctcataggccatgcattagaataggcattttcattatgctgagggattatttctgaagcatgatattctgttgcagtataaacattgttattgacttccgttcttggagtagatctataagtataattaactaattcctcaccaaacagactttttagtacctgtccgaattcaatgctgccatttatatttaagccacgtatcagtagtgctccgctggttgataaaaaattttcaacatcctttttattttcttctgcccatatcaagggattattataactggtatctatctccagcaacatcttttttcctgaaataattttaatatcatctaaattcatagcatcattttatttaatatatatttatgtctttaattttatactgagtcattgataaaaggctgaacaatttcaactgactctatattattaattcgtctccttcaacaagtactactccgcttctttcctttatccattttaaagtacttatttcttcagacagactatcaattgtaggtttagagagcagatttctaatattaattttaactccaaaatttttctcaatcctgatgattagctgtattgctgttaagctgtgaccacctaaagcaaaaaagtcctcgtttatcgcaatattttctctttgcaatacttcttcccaaatttctaccaactttctttctgtctcattacgcggagctacatattctacgccacttgccaatcccaatccttcaggagccggcaataatttcttgtcaattttaccattaacattgagaggtaattcttccaattgaacaaaatgatttggaatcataaaattcggtagaaactcttttaaaagcaacctcaattcacctacgttctgttcttttttggaagtaatgtaggcaaccaactgtttttctcctgatatattctctttggatataactacagcctcctttattaattcattttttaacagagcattctctatttctccaagctctatacgatatccccgaatcttgacctgttgatccttacgaccggaacaatagagagcgccattgtttaaccagaacccaaaatctccggttcgatataaacgatcttcgcctataaaagggttttcaataaaactcagatcggttagcgctttacttgtatatccacgtgaaactcctttgcctccaatatatatctctccttgaacacctgctgcaaccagcttacgattatcatccaaaatatagattctggtatttgcaatcggttcaccaatctcaattttttgagtgtttttctccaatggttttacagtggaccatattgttgtttcagttggaccgtacatattatatagtttcgcattgggtaatttttgataaatatcatttactaatgaagcagtagctggttctcctcccaaaaggatattcgtaattgaactccaaccttcattttctgaaaaatgctgattcaacaatgttcccatagaaggggtaatctgtaaatgcgttaccttgtgtttcttaatttgcgaataaaccgaataattattctgtgaattattatagctatctttaagttccgttaatcgtttcaaactttgcatagtcgaatcataatcaactccaaaatcaattaatgaagcaatttcatctaccccaataacacttaacttttgtagcattttaaagcatttttcctttgttccaaccatacttgaggtagaaataaatcttttatatgcgtattcatataaatcatctaaatcatcttcagagaatcgatttatttctgtattttgatcgagatcaggaattaaatttcgaatcagttctgcagagctttttatatagtcaataaatggtttacgagcatttatctcaatattcgcttccgtatcaatataggtgtgcagcattatagttactttcgatttcttgacatcatatccattttccgcataagcttctcggtatgctgcaatcttctctgcaagatcttccatggaatttcctaataaatgtgttaagatattagcaccgatctttcctgctgaaataaatgtttccttattcccggctgaagtaatccaaagaggtaattcgtcttgtacaggcttgggaaatatttttgtctcttttaaatttccaattccgttttcaaatgttacactttctcctttccacaattttcgcaatgtatcaattgattcatacattactttatggcgtttttcataattatcgggtgttaacacaaaatcatctgtatgccatcctgaagcaaatgctactcccacacgtccattactcaggttatcaataacagaccaatcttcagcaactttaattggatggtgaagtgggagtacaacacttccagctctaatacaaacttttttagtaacagaagacagtgctgcagccattaaaccaggatttggatataatcctccaaattcattaaaatggcgctcaggggtccaaactgccaaataatcattttcgtctgcatatttagctccattcatcaacaacttatacttgtcttctccattttcgtaattgccaaaataaaacaggctaaaatctaatggcttactgttattcgtttcatcattaatctgcctgatgtctccttgtataacaactttgtatcctttactcagtgtccataaaagttccaatacagatatgtcaaatgtaaaattggtcatagataaaaagacccctttctcttctccaaaaatatttgttattccagtaaaaaaattagtgacattatgatgctctaccatcactcctttgggatttcctgtagatccagatgtgtatattacataagcaagattgtatgattgggtagctgttattatttggtttactgaatacttttcctgaaattcttggaacctcaataattcttctaaatccagtagaattttacatttactatcttcaacaattgcctgaactctttcctgagggtattccagatcgataggaacataagctcctcctgattttaatacgcccagtatcgccacaatcatccactcacttcgctccaattgtatcccctataaaattgttatatttttctatatttgaaatattaaaaactaaccgctaatgatcttttacagacaagacctaactgacactcaattattagacttatataaaaaaattctcaaaccccgactcatcgaagaaaagatgctcatcttaattcgtcagggaaaagtttccaaatggttctccggaatagggcaagaggccatcgcagtgggggttacctctattttagatgactcagagtatgtactgcctatgcaccgaaatctaggcgtttttaccagtagaaatatcccgctacatcgtttattttcgcaatggcagggaaaagcaaatggttttacaaaaggaagagaccgcagttttcactttggtactcaggaatacaatattatcggtatgatttcgcatttgggtccacaacttggtatcgcagacggaattgcactggcgcataaacttaaaaaggagaataaaataacagcagtttttacaggtgaaggcgctaccagtgaaggtgattttcatgaagcgctgaatatagcggccgtatggaaactacctgtcatgtttgtaattgaaaacaacggttacgggttatctacaccaacaaacgagcagtatttttgtgaaaacctggccgataaaggaataggttatggtatagagagtcatattattgatggaaataatatagtggaaatctataataaactggcacaactgaaagaagaaatgcagaaagatccgcatccggttttactggagtttaagactttcagaatgcgtggccatgaagaggcaagtggtaccaaatatgttccgcaagagctaatggacgaatgggcagccaaagatccggtagcgaattacaaaaaatatttaatagaaaccggtgttctgaccactgaatttgacgaacaattgcacagttccattaaacaggaaattgatgaaaactgggccatggcaaatgcagagccggaaatcgttccggattatagtggtgaattagatgatgtttataaaccatttgtttatgaggaagttaaatctgattctgaagtaactaatattagatttattgatgccatcagcagcagtttaaaacaatcgatggaacggcatgagaatctggtgataatggggcaggatatcgctgaatatggtggggcctttaaaattacggatggatttgtaaagttgttcgggaaagaacgtgttcgaaatactccaatttgtgagagtgcggttgtttctgccggaatgggattgtcaatcaacggttgtaaagctattgtcgaaatgcagtttgccgattttgtttctacaggttttaacccaattgtaaatttactggctaaatcacattaccgttggggagaaaaggccgatgttgtggtacgaatgccttgtggcggaggaactcaggcaggaccttttcattcgcagaccaatgaagcatggtttactaaaactccgggactaaaagttgtttatccggcctttccgtatgatgcaaaaggattattgaatacttctataaatgatccgaatccggtattgtttttcgaacacaaacaattgtatcgtagcgtttatcaggatgttcctgtagattattacactatcccgttaggaaaagcagccttattgaaagaaggagattctatcactataatagcttttggtgccaccgttcattgggcattagaaacgctgaataaaaatcctgaaataaaagctgatttaattgatttaagaacgttacagcctttggataccgaaactatttttaattcggttaaaaagacaggaaaagtaatcatttatcaggaagatactttgtttggaggtattgcgagtgatatttcggccttaattatggaggaatgctttgaatatttagacgctcctgtaaaaagagtagccagtttagattcacctattccgtttaccaaagcactggaggatcagtttttagctaaaaatcgatttgaagatgttttattagaattattgaaatattaattacaaataacaaatagttttgcataaagaacattttttttatctttaaaccataaaaaatataacttatgaaaaaactgtttgtttcaatttttgcaatcacggtacttttttcctgtaataagaatgggaagtctgagagcgacaaagcattagatacaaaattcgacgcttataaggatcgttttgttactgatttatggaagattaacccgggctgggcttcggctgttggttatcataaactagacagtgttttggtggttccggatgctgctgaggaaaaaagacaacttgattttgttaattctgaattggattctttaaaacaatttaaacttgaagatttgtcggataacaataagacagattttcaaatgataaaaaatcaattggaagctactgtttttagcattaaagaagtaaaatcttctcagtggaatccttctgaatataatgtttgtggagctttcgctgaaatcttaaatggtaaatacgattcattagaagttcgtttacgtgctttcaatgctaaaatgaataaggttcctgcattttatgaagcagccaaaaagaatattaaaaatccaacagttgaacatacagagcttgctatagcacaaaatttgggtggttctagtgtttttgacgttgacttggctgcagctttggaaaaaagtaaattaactgctgccgagaaaaaacaaatactcgataaaggaatcgttgctaaaaaagcagttgcagattatgctgactggttaaagaagttagaaaacaaaacaccacgttctttcagacttggatcggaattgtttgctaaaaagttcaattttgatattcaatcaagctatacggcggaggaaatatttaaagttgccgtagatcataaaaaagatttgcacgaaaaaatgtttgttttagctgataaactttggaaaaaatacaaaggaaacgaaccaaagcctgctgataaactggatttaatcaaacaagtaattgataaaatctctttacagcatactacaccggagaaattccagtctgaaattgaaaaacaaattccggaattaacagcctatgttaaagcaaaagatttattgtatatcgatccttcaaaaccacttgtagttcgtaaagagccggcttatatggcaggagtggcaggagcttctatttcagctcccggaccttatgataaaaatgctaacacctattataatgtgggaagtatgtcaggttggacggctgaaaatgcagaaagctaccttcgtgaatacaacgattatatccttcaaattttaaacattcacgaagctgttccgggacattatactcaattggtgtacagcaatcaatcgccaagtatcattaaatctattttaggaaatggcgctatggtagaaggttgggctgtttatgcagagaaaatgatgttggaaagcggatataaaaactctgatgagatgtggttaatgtattacaaatggaacttgagagctacttgcaacaccattttggatattagcgtacatactaaaaatatgtctaaagaagcagcattggatttattgactaaagaggctttccagcaacaagctgaggcagatggaaaatggaaacgtgttactttatcacaagtacaattgtgttcttattttacaggatatactgagatctataacttaagagaagaacttaaaaagaaagaaggagataaattcaatttaaagaagtttcacgagaaattcttaagttttggaagcgctccggtcaaatatatcaaagagttaatgttgtctgaggaataaacagcaacaattacggccgattttaaacttatagaatcgtcgtttgcaaaattttgttttattaagtgtaaaacattttttttgagaactgcgtcctaatggatgcaaagtaaaaagactaacagtttgtttaactgttagtcttttttattttgaggtttaaacagtaatttatgtaaacccgacaggtttttaaaacctgtcgggtttgttttataggtcaaattctatttcgacttcgattctagttcaaacaattgtacctgacttttcaatcggtcgatgagtaaattcatcatccttttgttgagactggaggagttttgaatataggtttcgtattcttcaagggtgaaaagcgccattacgattccttttagagaatttctaaacttaatatctttctgaatggagttttcgatggtttggagtttcttttcgactgtgtacgagtaaaaatcagctttatttttattgacatagttaatgaaaaccgccacaaataaatcgttctgaagttttaaaatgggtctaatggtttgattttgaaacaactcatccgcagaagattgagcacttatggttcctaaagtttcgcctctgaattcttttaaaaaagagtctcttgcttccatgttttttctttaaatttagaaaaaaatccaatacaaaattttttattcaaactaaatattatgcgatttcataccagaaaatgggttaaacccgaagatttaaatccgaacggaacattatttggaggaaagttacttgcctggatcgatgaagaactggcactgtatacgatcattcagttggaaaatacgagagtagttaccaaatacatgtctgaaattgattttaagagttccgcccgacaaggtgatatcgttgaaattggaattgatgttgtgaaatttggaaacacttcactgattttaaaatgtgccgtacgtaatatgatgactcgtgaaattatcattaccatagataaaactacgatggttagtctggatgaagagggaaaacccaaagctcacggaaaaactcaaattgaatttgtaaaagatcgtttgtaattttttcggcacacaaaaacagaacctgttattttaaaaactcaaacaatggtcaaaacttttatagtagcttctttattgactcttgctctaatttcctgcaattcaaaagaaaacaaagaagagtacaaacatgccgtctatcgtgcggttcacaaaggcgatacagcaatcttggacattcgtataaacaataagcgtttttttggccgttatgaagtattctaccataaaataggtaaagattcgggggatgtaagaggggatatcaaaggagatacgctaagaggggattatcattttattgctaatggcggaagctggaagagaattcctttagccttgctaaaaaaagacaataaattgttcttaggaaaaggagtaatcggaatctattttaatcttccgctttttatgcccgatcagcctatagattataacgaatcagggtttgtttttgaaaaagttaaggagtgattttttagtattcagtctcagttctcagtctcagttttatgccgagactgaacagcggtactgagaactgagaactgagactgagactgagactgaaaacttagactgaaaactgagactgaaacctgaaacttgaaacctgaaacttgaaacctcaaacaaaacttttcttaatcaaacctaccaatcttcgaaggcagttcaaatatctcaagatcgaaatattctacggaagccattacatgatcaaaaatatcagacataatatattcgtaattggcccagcgtttgtcgctcgaaaaagcataaatttctaaaggaactccatttgcagtcgattgcagttgacggcacatcatgtgcatgtctttgtttaagccgggatgtgttaccaaatattgcatgatatacttgcgaaacaatcctaaattggtcatgtttcggccattaagcgctagagttttatctactccgcgttgctcattgtatttgtcgatttcagcttgtctgctttcgatataagaagaaatcaattgtacttttttcatctgattcaaatcttcgtcattcaaaaaacgaatgctgctgcttttgattaaaacgtgtcttttgatacgtcgaccgtcagatttttgcataccgcgccagttctgaaaagaatcagaactcaaagcataggttggaattgtggtaatcgtgttatcaaaatttcgaaccttaacggtcgtcaggttaatttcgattacatcaccatcagctccgaatttatccatcgtaatccagtcaccaatacgaaccatatcgtttatcgctacctgtacactcgaaacaaacccgagaatagtatctctgaaaatcaagataataatagctgaaagtgttcctaggatagtcagcaattcgccttgtttgattccgaataacttcgaaataataatggcaactccaaaaatccaaagtacgatcataataacctgaacaaaactatcgattggtttgtcgctgtattccggtttttgttttaaataatcacgtaaagcattaaaaatggtgcgggtaatccacaatcccagtaaaacgatataaacacctactatttttccaaaaacagactcccagtactcatatttatccagaatgattggaacagccttgtaaataaagaaaaacggaattaaataggccgtatattttgtggttttattgtgaataaggtaatcgtcaaattttgttttggtacgctgcgcaaaaacggcggttagcgtaaccaaaacaaattttgccaaataataaatggcataagccagtattaccataatggcaatattaaagaccaggctcacataagacgcaatattacggctcatgccccagtctctaaaaatagggtataaaaagttgaatattttatccaaaagtctaggcattattctccaggtattttttctctatataaaaagttccaaacggaataagtgaggcgatttgtataattgcaaaggtttttaaatcccagttttgcggttttttaagtaaaatagcgagtaaaacatatccgataaataaaacaccatgcgtcattcccaacggacgtaataaggtgtgataaagttcaggattattggttttgatgaaaagcatattggtaaacaatactaaataagagattccctctaaaattgcagtaactttgaaaatcttgagcatattctaatttttgagtttaatactagcaaaattaagtattatcgttggtttttgcagtatgaatcaggaaagtaatttacttttgtaatcttaaactttgataatgagtaaacgcgatttaaaaaaatatcttgccgaattagataaggaacagctcgaagagcaaattatcgaattgtatgaaaagtttagtcctgtaaaagtgtattacgattttgtctttaatcctaaagaagataaactgttgcaggaatgtaaagtaaagatttcacacgaatattttccaatcaaaaaagcaggagccagaaaacgtccgaaagcaaaattgcgacgttcagtagcgcagaaatacatcaaacattttattttattgggagttgatccttttgtggttgctgatattatgctttacaatatagaaatagcacaaacttattcgtctcaaaatccggttaaacaggaattattctgtaaaagcatcttcaattcctttgaacaggcagtgaatttttccatttccaatggaattttaccggattttaaagaacgaatcgtcaccattcaacaagaaactcttcaacaaaaatggataaataggtacgatttcgaggcaattttagagaaaatcgactaataaatcgattctcataaaaaatcttatttaaaaaaaacatttattttaggttaaaataaagtgaaaaactgttttttcggtgtatttttgcaaaaatccaaaaataaacaatgtctcaaaacactttagaaatagaaagagaagagaaaaaagaactttatgcatatcaaaaaggcgatattgatgccatttttgatcgtttagacaacgctcctccgaaacatcatttattatatcaattgcctactggtggtggaaaaactgtgattttttccgaaatcgttcgtcgttatttagctaataatgataaaaaagtggtggtcctgacgcaccgtatcgaactttgtaagcaaacctcaaaaatgctgaaagggtttggtgtttccaataaaatcattaacagtaaagtaaaagaattaccggatcaaaacgatttctcttgttttgtggccatggtagagactttgaaaaaccgtatcaatgacgaaaaattacatttagataatatcggtttggttattattgatgaggcgcattacaactcattccgaaagctgttaaactcattcaaaaatgcttttattcttggagtaacagcgacgcctttgagttcaaatataaaattaccgatgcaccagagttacaatgaacttattgtgggtgataccattagttcattgattgacaagggatttttagctcgtgcaactacctatagttatgatgttggattaacctctcttaaagtaggtattaacggagattataccgtaaaatcatctgatgatttgtataccaatactattatgcaggaaaaattactgcatgcttatacggaacgttcaataggcaaaaagaccctgatttttaataatggtatccacacttcgttatatgtttatgaaacatttagagaagcgggttatgacatcagacaccttgataacaccagcagctcagaagagcgtaaggatattttacaatggttcaaaaaaacaccggatgcgattctgacttctgtgggaatcttaacaacaggttttgatgaaccaacagttgaaacaattatcttaaacagagcgactaaatcattaactttatactatcagatgattggtcgtgggtcccgtaaattacccggaaaagacgaatttacagtaatcgatttaggtaataacgcagcacgttttggtttatggagtgagccggtaaactggcagcacatctttaaatcgcctgaattttatttggagaatcttcgcgatgatactgagattgaaatgtactttaaatacagtatgcctccggaattacgtgctaaattcagtaaaactgccgatgtaacttttgatgttgatgaagaacataagttaattatcaaacaaaatttacgttcaaaagtggttttagacaaatcattagaacaacatgcttccatgtgtgtggacaatacagaaacgctgcaagaagcaaaatcattaggaaaagaacttgatgatgatatagaatgccgtatcaaacgttttgcaaaatgtttgagtcagtgtagtaaaaattaccgcgaatggcttcttgacgattataaaaagaacctgacgttattaataggtaagaagtatcgtgaaaaaatcatgaacgaaccggacgaatagaaaaattttgtttcaggttttcgcgttgagcgaaatcaaagttacaatatgtcatttcgacgaaggagaaatcgcactggtattacacaaagtttgtcgaatattggatgtgatttctccttcgtcgaaatgacataataaagaactaaaggttctaaaaaatcattttaatccgagtaatctgtagcaggaatcaaaaatctaaaatcagaactctaaaataaaaagtatgtctaaacaattctcatcattaggaatttcagcaccaattttaaaagcattaggcgaattgaatattgttgaaccaacagaaattcaacaaaaaacaattccattacttctggctgaaactcaggatgtagttggtttagccaaaacaggaaccggtaaaaccgcagctttcggattgccgttgctgcagttagtggatactgaatctcctgttgttcaggctgtcatcttagttccaacaagagaacttggacagcaaatctttagaaatttagaagattttggaaaacatattccaaatatttctattgcttcagtttgtggaggaattccaataaaaccacaaattgagcgattaacacagcctacacaaatagtggtggctacaccgggacgtttaattgatttaattcagcgcaaagcgattgatttaaaacaaacttcttatttagtgctggatgaagccgatgaaatggtttcgatacttaaagaaagtttggacgaaatcattgcggaacttcctaaaaaacaccgtactttattgttttcggctactttaccgggaacaatcaaacagctgattcagaactatttgaataaaaatgtagttcaggttagcgccaatatggaaactgcaggtaatcaaggaattgatcacgaatatattgtagtggatcccattgaaaaactggatgttttaatgcatttcctaaattcaaaagaaggggaacgcggtattattttctgtaaaaccaaagcagcagtcaataaattggcgaagaatttagcgatcaatcgtttttcttctggagcacttcacggcagtttgtcacaaggaatacgtgacagaattatggagcaatttcgtgaaggacatatcaatatattagtggctacagatttggcagccagaggaattgatgtaaaagagatttcttatgttgtgaattatcatttgcccgatacttatgaaaactacgttcaccgaagcggaagaactgcaagggcaggagcgaaggggctttcactaactgttttacaggaggaagaagtagcagaaattccggaatttgaagcagaattaggaattaaatttacccaattccaaaaaccgtcggctttaagtcttgaagaaaacaatatgcttttatgggccaagcaaatttttaaaacaaagcccaatcatgatatgtcaagcgatctgaaaacgaaggtaaagaccgtttttcatcatctgactaaagacgaactaattgaaaaactgatggccagttatgttttacagaacaaagttgaagtcaccgaaaaacctgttaaaaaattcaaaaagtaatattccggccgattaactttgctaatttatgtcgtatatttataaggtaatttcactataatcccagttaatatacagcatatatgaagatagtcatcataggaggtggttttgcaggaatcaatcttgcaaaagagcttgttaaccatcctcagatacaggtaacacttgtagacaagaacaattataacttttttccaccacttatatatcaggttgccactgcttttttagagccctcaagtatcagttatccgtttagaaaattctttgctggtaaaaagaatcttcagtttcgtttaggagaactgctttctgtggttccggccgagaataaaattatcctgaacaacggagaattaacatacgatcatttagtttttgcaaccggtgctgaaaccagttactttggaatggaaaatgtaatgaaaaacgccattccgatgaaaacgctaaacgacgccatcgaaatgcgtaatgcactgcttaaaaaccttgaaaaagcagcaattaccaaagacatgcgcaaacgacgcaaattgttaaccattgttgtagcgggaggaggaccaacaggtgtggaagtatccggaatgtttgccgaaatgcgcaaaagtattctattaaaagaatatccggaattagaaacatcagccagtaatgtgtatttagtcgatgggggagacgcactcctctcgcctatgagtaaagcttctcaggaggatactctggatgcacttaccaaacttggtgttgtggtaaaacttcaaacacgtgttgttgactatgttgatgatactgttcatttcgctaacggcgagaccattaaaaccaaaaatctgatttgggcagccggagtttctgctaaaacttttgaaggaatcccagcagaaagctatggtcgtggaaaacgaatggcgacagatgaatacaataaagtcaatggactcgtaaatatttacgctattggtgacacagccatcacagccggtgataaaaatttcccggacggacatccgcaagtagcgcaggtcgctattcagcaaggattaaatttggctaaaaactttaaagcaatggttcaaaataaacctttaaaagcatttatgtacaatgacaaaggttctatggcgattattggaaaaaataaagctgttgtagatttaccaagtccaaaatggcattttaaagggttttttgcctggattatctggctgtttatccacctgatatctctaatcacttacagaaacagattaaatacattctggaactggatggtcgcttattttgcaagagatcagtctttgagaatgattatcagatcggataaaagatcttagaaaataaatcccaatcttttaaatttcaaactccaaggagaaaaaagatacaaactacattagaataaaaagccagaatcataatagaatctggcttttttatgcagtcttgtcatttcgactgaaaggagactcgagcgatagcgaacaggcgtagcaaatcacactagtggctcgacaaagattggcgaattactttgcggagtttctagtgtgatttctccttcgtcgaaatgacaattcaaaatatctttattagtgaccaatcgcaatatcgtcttccgtagtcaattctactttttgtttgatagaacgtttgctgatgtttaaaaagacaaaagctgtaagagtagtagtggtcataatagctaccattggagctacagaatctttaacgaaaactccaacagcaaacgaagccaaagccccaatacccaactgaatagcccccattaatgctgaagcacttcctgtgtttttagcaaaaggcgccagggtaagtccggcagtatttggattcgaaattcccagacaagccagaaataaaaacaacattccgatagtttcatacaatcccaaaaggtcatttaaagccagaattagaaaaaggatactaataacagactgcgaaattagcgccccaaaaatcatctgttcactagaatatttcttcaataataaggagtttaactgacttgaaccgataaagcttaacgacataaaagcaaaaatccaaccgtaagtcttggcatcaacgtggtaaatgtccatgaaaatgataggtgaggccgcaacgtatgaaaataagcccgaaaaagcgattgcaccagtaaaggcataggtgtaaaactgtggctccttaaaaacgctgataaaattagtgataatcggttttggctttaaagatattgaggtatcaggcttataagtatttggtaaaccaatttgtgatgcaattaatatagcaattcccatacacattaggataaaaaatacggtatgccagccataatcttctgttacataacctccaatggttggtgccagcataggagaaagcccaaccacaagcatcaataaagagaatacttttggaatgtcttttacgggaaataaatcacgaaccatcgctacagaagccactgtggcagcgcaactaccaatggcctgaacaaatcgtaaaaggataaacgaatcaatattagttacataaatacatcccaaagaagccagaatataaaccatcaaacctataaacaaaggtttttttcggccaaaacgatccaataatggtccgtataataattgtcctgctgagattccgataaaataactggataaactcatggatacttttgctaccgaagtatgcaaatcctttgctataccagagaaaccaggaagatacatgtctattgaaaatgggccgagtgctgttaaagaacctaaaataaggataagggtaatgtatttttttgttgtcattttcttaaaaaattgcttttcattttttgcaaaggtaaagatttcatatcttgtagtgtaatttaaacgttttttaataaaacgtttgattaggttacgcattaattgaactataaaaaagcattattaacactaatcttaaatcaaaaattatgaaaaattacattttagtattcgcgcttatttttaccacaatttcatttgcacaaaccattacgtccaaaaaagaagaggcaaatgtagagcagtacgcattactgcaaaaagtaaacaaatattacccggacattactttaaacaaaaccgttaccaatttttatgcagatggcaatattattgacacgcatcaggagtttgatttaaccacttcaaaattttcaagctacaaaatcggacttgaaccggataacaaaaaattgctgtttgaatacgtatctgatgaaaccggaaaagtctacggagacgtcaccatttttaaaggaaatgcgctgcgaactactttcaatgaaaaaaacaatgaaattagcgtatcgctgaacggaaaaccagtttacctgaaaaagataaaacaaaactaaaacaatagattttagactaaaaattgaaatcaaacaaaagcattcgctacggtgaatgcttttttgttttatatttgaagctgattgaattacaaatacttttaaatcaaaatgaagaaaattttcgtattcttattaatgattgtttctatagcgtcctattcgcaaaccaatcgatttaccggaacctggagcactgaaaattgtaaaacctgcagcaaagaatatgtcctgaaaattaatatggcgcaatccaataataaaatattcggaacggctgagattacgagcgacaatcagaaatttgtaagcggcgttatggaagttaccggtaatgtatacgcgcttggcgaaaaagctcaaattaccattaaaggcaaagacggttccgcaggtgccgttttatttgcaaaggatgatgttttacaattctcaaaaagaggcggtgacgatttagttcccaaagatacagttctaaccaaattgtacgagtagaaaaagataatacttaactcatttaccacctagaaacatagattttaagtctcaaaaaaggcgtttcacttatttaaaacacacagagactactatgtgtaagaaacatgtttcttgtaatactcttttatagacatcgaatctatgtttctatgtgtttaaaaatatacagttgaagtttacttgtacaccatctgtaaaagtatttgcaacagcgctttcatggaaagtatttgctatgatattaattgccatatcctcatcaaaattctcaatagcttcactaggtacttttaggattttggccacttgttctaagatattcttttctataactttttttgttccaacatagaaattttcttttggttccagtcttcgcctagttcgtaggcaagaacttcttgctttattccaagcatttcacgaaaacgctttatatttcttccttggtatacttttttgtttggcatattggtatgtattatataacgccagatctaggatttttagttctaatattaaagatgtactgtaacatatttttactatatttgctaaaataaatgtaataaaaaaggttcagatatgttacaggaaattatcgcatatagaaaagttgctgctcaactggacgaattaatagataaatcgccctacaaaaaaaagtatataatagagcaactcggtttatctagtcccacatattacagaaaacttcaatctcagacatttacaattaacgaaatgcttgcgatagcaaaaattcttgatccattagaatacaataaatgggaattattggaagaaattgagcaggcaaaagaagatattagaaatggaaaaactattcctcacagcgaaatggttaagagaataaatgcaaaaaagaaagatatttagaataaatacttgacttgtttctgtctgttgtcatgaaaaagtaaaagtagtattttattaccggcaacagtataaaataatgttatttgctttacaactaaaatactattaaaatcaaaatctctattgtagcgacctaaatgcggattttttgatatgatatcaattgtttttaatacttcttcatcaaactttttagcaatttctaaagaccaattctcaactaaatattcataatttttggtgtaagtcttttcagctttctctgtccaaattacttccataaaaactttttagggttataactattaatcgtttataaatatgtttttttgttcataaccaaaaaaaaatccgaaactgtaaggcttcggattttaattcattttgtaagaatttactctttatactcccccatcttactgtacttgtccattctttgggcaatcagatcatgtgttgataagtctttcaattcattatatcctttagtgatgtactccgctactgttttgaaagtggtttcgcgatcgtagtgtgctcctcctaatggttccgggatcacatcatcaactaatttttgttttttcatatcagatgaagtcaattttaaagcgtcggcagcacgttctttgtactcccagcttttccataaaattgaagaacaagattctggagaaattacagaataccaggtattctctaacatatacactttatctcctacaccaattcctaatgctcctcctgaagctccttcaccaacaataatagtgataataggcacttgcaaacgaaccatttcaaaaatgtttctggcgatggcctctccctgccctctttcttcagcctcaagtcccggatatgcacccggagtgtctactaaagttaaaaccgggattccaaacttctctgccattttcatcaaacgcaaagctttgcggtatccttcagggtttgccataccaaaattacggtactgacgggttttggtattgaaacctttttgctgacctacgatcataaacgactgtccgtttatttttcctaatccacccaccatcgctttatcatctttaaaacttctgtctccgtgaagctctaaaaatgtatctccgcagagtgctttgatataatctaaagtataaggtctatttggatgtcttgacagctgaacacgttgccaggctgtaaggtttttgtatatttctttcttagtttgctctaattttttgttgatttccttgcaggttggtgttacatcaacatcagattcttttccaattatgacacacttttctaactgttcttcaagttctttaatcggaagctcaaaatctaaatattccatggatttttgaattttgtttgtaaatcgaaccgcaaatataaaaatattaaactgtttatttctctaatttaatattaaagtataaaaaaatagatttaagatttacttcaaaatgctcttttagaacctgtcatactagtccttaaattgcctctttcaatttgcacttttttctgtgcttgtagtttttcagatactccccttttggagtaccatcgtcaaaagagctaaatttaagtatcattctgatctttttgcgagccgcttcatttgcaaaaccctcatattctatacgatacaacgccgaatacaactgagctctgccaataccatgataacaatggatcaaaaccggatagttattttcattatccattatcttaaaaaaagcatccagattctcctgagtaggaatctgatcggatccgttattaaaataattcactccttttattttctcaatcgcatttttttcagcggttagttctgaaggaatttccggattgttttttaaatcctgcgttcccggaaaacgcaaatcaataaccgatctaatacggtatttcttaatataacgttccaattgatcaggcggaattacaccggatttgtacactttattctttgttatggtctcaaaattatgattgacatgtacatcataaacatattttacaatccaaactagcacaactgccacaaccaaagaggcaataattttctttttcatattcatacttcactttttttgtagcgaaattactacaaaaaaagcaataaaaataaaaaagaaaccactttcttattcgtaatataatttgtgatccattatacgatcataatagtcctgaataaaagccttacaatttacatcgatctcattcatctccgcatttctactgcctatcaaatttttctttaaatctttatcattcttatcatagaaacctaaaaccttttgcccatcaaaagtacagatgtaatttcctttagaaaactgataaattgtaccggttgaattgatcacaaacggagctgaatcttttttatccaataaacttcttccccaacttctaaaaggtcttctataacctatcatatccagaatcgtcgggtaaatatcaatttgttgggcaaaatcagtatcaacacctacatatttactattagaatggtatataataattggaacagcataatgatttattgccttttgatattcgtcgtaataaacctgattacaatggtcggccacaaaaacaaatatggtattagaaaaccagggagcctttttagcctcatcaaaaaatctcttcagggcataatctgtatattccacacatttatgtatgggtacgccaccttcattaaatctgtttttatacttatcgggaataatataaggttcatgagaagaaaccgtaaatacactggcaaaaaaaggcgtttgctccttattgagggttttctccataaactgcaaaaagggttcatcccaaattccccaataaccatcgaactgagaatcatcattaaactccgttcttccataataatgatcaatgcccagaatgttcgcaaaacccaaaaatcccatcgaaccattagcagcaccatgaaagaaagaagtagtatagccaatcccttttaatgtagaaaccaacgattcaatcttttgtttgggataaggcgatgacgtaaacgcatccttaaaagacggaattccagccaaaacagacgacattccatgtatcgactgtcgtccgtttgcataggcatttgtaaaaatcaaactatgctgagacaaagaatccaaaaatggcgcatgacttttgtaattgcgaatcttagcttctttgttaaaagcacctatatattctcttccataactttcaagtataaaaagaacaatattgggtttcgtaaccggattattggcgtactgttttataggctgcactttttcaagtatcacttcttcgtttacatccttataatcaggtttggcaaagctgttggtaaataatgttctgataattgcaaaaggcgtattaagaacaatatccgaatgcgcaatacgggttacatgatcactggcatccaaaagattaataggtctggttgattttttaaaatctcctcctctgataccgccaattactaataaaacaataagtaaaaaggtaagaatcgaaaatccaaaataataaatcctattcagatgaatctgcattttaaccttcacttcgttgtacaatcctatccaaagtgtcgcaaaaacaaaaaacaaaagaaagacataccaataatcgatcatgaaactaaaagctaatatctttttattcgtctcatgttccagaacattcattaccgccattgtagttctggcaaaagtatacttgtaataaatgaaatctacaaaattggttgcataagcggttaagttcgtaccaaaataaagataaaaaaggattttttgatatcctttactggtgtttttaactaatggaagaattgataatacaataaaaagcaaattgacatacaaaatagctgttgtatcaaaagcaagcccataataagaaagtctcagcaattcgagaacagaatcaactttgagcaaatttttattgaacaaataaaagagaatcctcgcaaggaaataaaaaatataagctaatgaaagtctgtaaagaagaacctttaactcatttaatcggaaattatcatacattttgcgtaacattatttttcaaataaaacacaaatataagacaaatcttactttttaggttttttattttctaaataatgttttatcataccattcgcaataaccgtaactacaattatcagggcgccaatataaaattcggtgctcattttttctttttctccaagaataaaataagccagcataattccgtaaacaggctctaaattagtcgttaacatcacggtataaggcgttaatttctgcatcactttcactgaagcagtaaaggcataagcggtacaaaccgaagccaaaacaaacaataaagcccagttgtttagtgacattctaaaaaaatcggcagtgaattttccctgtactaaaaaataaattgaaataaagaatactccggcggcaaactcataaaaagtaattacagaaggatggtgttctgttatcaattttccattcattaaagtaaataaaacccccagaataatagcagctaaggcataatacattccatgcagatactttacctcgacctgcataatcaatgctaaaccggccataataatcaatccgaagaaaacttcgtagaataaaatttttcttccgtaaaaaagtggttccagtaacgacgcaaaaaatgcaccgagtgagaatatcgaaagtgttatagaaacgttggaaacgtgtatcgctctaaaaaagaaaatccagtgaagcgcaatcagtaatcctacaaaaatcagtttcgcaaaggaagtcgccgagattacaaatgattgttttttgtacacaataaatgctgcgagaaaaactcccgcgagaagcattctgaaccaaaccagattttcggcatcaatagttatcaaagcacccaaaatggccgtgaaaccccatataaaaacaattaaatgaagatttaaataactttttaaattatcgtttcgcattacgtaataagtaaactgccaggattccgaaaacaatattcgggaaccaaacagcaaataaaggtgagaaggtagatttttcggctaatgttccgaatattttgtcaaaaaatacaaacgaaaaggcaattgcaattccgatcgccagattcgtccccatacctccacggcgcttcattgatgaaaccgccaccgcgataatagtcagaataaaagcagaaacgggtacactgtattttttgtacaatacaactaaataagtattaatattccccgaacctcttttacgttctttttcaataaaatcgatcagttttccaagcggtaaggtttctgcaatgtaaactacgggagttaaatcggctagttcaaacttgaaagcaactcttttctcaggacttttttcgatctgatcgtttaattctcctagagttctttttgtataatcatacaaagcataagtcttagatttaggatcccatttgatacggctggccgtaattttatagttcagcttttcattttcgaaatgttctaatgtaaaattaaaggctgttttagactcttcattaaagctattgacaaaaataaaatcgttgtcattaatttgtcgatatacattggtattattacccaacatctctacttttccgttgccttttaagtaagtatacctaaaattattaaaaccttcactggccgcaggaacaataaaaaatcccaataaaagcacaaaaaccgaaacgattgaagcgccaataatataaggtcttaaaaaacgtgaatatgaaattccggaacttaagacagcaataatttctgtattattggccagttttgaagtaaaccaaattacagataaaaacaaaaagatcggaaagagcgagttcgcaaaataaaccgtaaaattgtaataataaatcgcaattgcagtaaacggaactttattttccaacatcttattcaccttttcagaaacgtcaattacaattccaattggaataaataacaagatcatcaccgagaaagtggctaaatatctttttaaaatatacttatctattatcgttaacatagcaaagtttaatcgttgatttgtttaatcgattaaccgaataatcgattaaacaaatcaacttttttatagtctttgactcatatttttaaccatcatttctttccatggtctgaaatcgcctgctaagatatgttttctggcttcacgaaccaaccacatgtaaaaaccaagattgtgaatagtcgcaatttgttttcctaaatactcattagccgcaaataagtgacgtaaatacgcttttgtgtattctgtatccacaaaagtatgtcccatttcatcgattggagaaaaatcagcttcccactttttattcttgatgttgatggttccgtttgctgtaaacaacataccgtttctggcattacgggttggcattacacaatcgaacatatcgattcctaaagcaatattttctaaaatattaatcggagttccaacccccattaaataacgtggtttgtcctccggtaaaatttcgcaaactacttcggtcatggcatacatttcttctgcaggttctcctacagacaaacctccaattgcatttccttgttgtcctgcattggcaatatattctgccgactgacgacgtaaatctttataagtacttccctgaacaattggaaaaaatgtttgctcgtatccatatttataaggcactttatccaagtgattgatacaacgatctaaccagcggtgggtcatgtgcatcgaacgctgtgcatatctgtaatcacatgggtatggcgtacattcatcaaaagccataataatatcggctccaatagtacgttgaatttccattacgctttctggcgaaaaaaagtggtacgaaccatcaatatgagatttgaactttactccttcttccttaatttttctgttattagaaagagagtacacctgatatcctccagaatctgttagaatattacgatcccaattcataaatttatgcaatccacctgctttctccaaaatttcggtctgcggacgtaaatacaaatgataggtatttccaagaataatatccggattgatatcgtctttaagttctcgctgatgcactccttttacagaagccaccgtcccaactggcataaaaataggcgtttcgattacaccgtgatctgtagtaatacttcccgctcttgctttagattgcggatctctttgtaataaatcaaacttcatctgtttcttttttcagtcggcaaagataagctaatttcagggaaaattaattagataattaggcaattagataattagatcatttagatgttggattactggattgttagattattggattgttagattattggattgttagatagtctgattatttagacaactttattattaatgcgaatgaaacctgaaacttgaaacttttaacactgaaacctgaaacctaaaacctgaaacttgaaacgtgaaacttgaaacctgaaacttgaaacctgaaacttgaaacctgaaacctaaaacttgaaaccttaatgcacatttatcatgaaaaaaatctaaatttgataaaacagaaaatccgcttaatctcctctatacaaaaagacaactaaaaaatgaacctagcacaaaaacttggatatcctgaaaacactaaactattaattattcatgctgatgatgctggtctgtctcattctgaaaatcaggcgaccataaaaacactgcaaaatggctttgtaaactcttacagcataatggttccctgtccatggtttttcgaaatggctaattttgccaaagacaatccacagtacgattgtggtattcacctcaccttaacctgcgagtgggagtattacaaatttggtccggtccttccgctttctgaggtttcaagtttaactgatcaaaatggtcatttctacaaaaacagaactgattttaaaaataatgccaaacttcctgaaatcaggaaagaacttaccgctcaaatcgaaaaagctttacaatttggaatacagcctacccatcttgattcacacatgtgcagcgtgggtgtaactcctgcaattttagaaatctataaagaactcggaaaacaatataatcttccggttttcattaacaaacaatttgttgaatccatcagtttatctaacgaaaaataccattttgaagacactcttctcgctgatcatttattgattggatatttttcggactttgaaaaaggagaattaaggaaatcatactccaaggcgctggacaatgctattccgggattaaatgtatttctgcttcaccctgcttttgacgatttcgaaatgcagggcatcaccctaaatcatcccaattttggttcggcctggcgacaaattgactttgactttttcaccagtgaagactgcggtgcaaagctgaaagaaaataacattcaactagtgacctggcgagagattgcatcaattagataatttgacaattagcccattcccctttaaaatcatggccttgccttttttgggcattacaaaaccaaaacaacccattttttctccatattgacacaaaaaagtgggataatttcatcattagcgcaaactaaaccggaaaatcatttgtctccccgcaaaataaaaattacttttgcaccagtttaacttttacacataaaatgaagcctaacacacaacaattaagcgatttaactatccaagtaagaagagatattcttcgaatggtacatgctgtcaactcaggtcacccaggtggttcattaggttgtactgaatttttggtaacactgtaccaaaacattatggagcgtaaagaaggttttgatatggacggaatcggagaagacatcttcttcctttcaaacggacatatttctcctgttttttatagcgtattagcacgtagcggttatttccctgtttcagagcttgctactttcagattactaaactctcgtttgcaaggacatccaacaactcatgaaggattacctggaattcgcatggcttctggttcactaggacaaggtttatctgtagctattggtgcagcacaggcaaaaaaattaaatggtgacaatcatttaatttacagcttacacggagatggtgaattacaagaaggtcaaaactgggaagcgatcatgtatgcttctgctaaaaaagtagacaaccttattgcaactgtagacgttaacgggaaacaaattgacggaacaactgacgaagttttagcaatgggaagccttcgtacaaaatttgaagcttttgactgggacgttcttgaaattaaagaaggaaacaacatagaagctattattgcaggtttaaacgatgcgaaatcaaaaaccggaaaaggaaaaccagtttgcattttgctatatacagaaatgggtaacggagttgattttatgatgcacacacatgcatggcacggtaaagcaccaaacaacgatcagttggcaagtgctctggctcaaaacacatcaactttagcagactattaaaaacagctttaagccttaagcagtaagctttatgcctattgcctacagcctatcgcgtacagcaaaaaaacaaaaatgaaaaaatatacaaatacaggaagtaaagatactcgttcgggttttggagcgggaatgactgaactaggtcaaaaaaacgaaaatgttgtagcattatgtgctgatttaattggatcattaaaatttgatgatttcaaaaaaaatcacccggaacgtttctttcaaatcggaatcgctgaagcgaatatgattggaatcgctgcaggtttaactattggaggaaaaattccttttacaggaactttcgctaacttctccacaggaagagtttacgaccaaattcgtcaatcagttgcttattctgataaaaacgtaaaaatttgtgcttctcacgccggtttaacactaggtgaagacggagcaacacaccaaatccttgaagatattggattaatgaaaatgttgccaggaatgactgtaatcaatacttgtgattacaatcagactaaagctgctactttagcattagcagatcatcacggaccggcttacttacgtttcggtcgtccggtagttcctaacttcactcctgctgatgagcctttcgtaattgggaaagcaattttactaaacgaaggaactgacgtaactatcgttgcaacaggacacttagtttgggaggcacttatcgccgctgaaacccttgaagcaaaaggaatttctgctgaagtaatcaacatccacacgatcaaacctcttgacgaagaagctattctaaaatcattagctaaaacaaaatgtgtggtaactgccgaagagcacaacatccttggaggtcttggagaaagcgtttcaagagtattagctctaaacaatcctgcaccgcaagaatttgttgctgttaacgacagttttggtgaatccggaactccggaacaactaatggaaaaatacaaactaaacaatcaggcgatcgttgaagctgtagaaagagtaatcaaaagaaaataatcatttcattttcttacttaataaaaagaccccgaaaagcaattttcggggtcttttgttttgatcctacctctagaaaaaaagaacactagacatagaacatccataagcctccatatatattccatgaaacactaagctttctttttctctacattaaaaaaacaccctccatctacagcatctacgagaaacaaactttttaaaactctgtcaatctaaaagctcaaatcccctcatctgtcaaccataaaaaaaccccgaaatcactttcgaggttttacattttaatatgacttaaaacttaattttgtttatatggataagtattatccaaatgaatcctttttctacctggtgtcgtataatctgcaggaacaaattttttgggatttgttatagattccggcttactaggatcagtaagagccccacttggcctgctcggtattccccaagtctcagactcatcaatattaggtgtagatggattatctaaaattggatcatacggataatacttactcaaaccagaaaatggagcgtcagtaggcttagtaacttcaaatcgagtcgtaaaaccatctccatcatcgtcctgatctaagaaatccggaattccgtctttatcagtatcatccaaattttcaggagctttaggatacaacgttgtgtttctgtaatcataaacataaccatccccgttaagatcttcctgataatcaaaaaccccatctggattctcaatcaaaacacccgcactggaataaccattgttttcgtgatctaatcttttaaaatcatacaatttaactgtaaaaattaaaggcgcataagcaggtattgagcctgatgaaggcggatttgcataatatcctaatcccgaaggaataaacaatactccagcaccaaagtccttataactcatagttccatcagcattcgctttacttgtcccttttttaaattgaggaaaaacttcactccatcccataattgcactatacaaatccacaatgttatttacatatacaacttgctcaaagaatgtagtggttaacttctcgggatccgtagctgttttctcaactcgctttaaatactcccctttataagctgctactacaccgtctgtattcattggcgatataccagttccttctctcaagaccaaataatacattttatattttattccatgcaaatccacatttctagttaacaacttaggaaacgtagcactatttaaataagacatgattgaaggctgcgtcgcaggatcagtaatcttcgtaaatgtaacatcctgatctgttaaatctccaggcttatcaactaccgtaatataatttgtctttaaatattcctcaatatttgcattatcaatattaaattgttcctgataatcttttaaaggagccaccaccacttcatcatcatcctttttattacaagaaacaaacgaaatacctgcaagcaataaaataaaataatatttaaatttattcattattgttaattttttaggtgcgcaagatacaatattgatttatttttgtaaagattttaacttcgattttagaaaaattatgagaatagacaaatacctctggtgtgtacgatattacaagaccagaaacatggttacggaagcctgcaaaaagaaccatatcactgtaaatgggcaggttgccaaaccatccaaagaggtttttccaaccgacagaattacttttagaaaagatcagattacacaaattataactgtactcgacatccctgaaagccgtgttggagcaaaattggttgacatataccgaaaaaacgaaactccgcctgaaacatatgctcatctggaattactaaaactatccaaagaacattatcgcaaaagcggtaccggaagacctaccaaaaaagaccgtcgcgatattgacgaatacggcaacgaaatatttgatgaggaagaagaagtttaaattaattatattagcaaaaaaaataaatcatgagcaaaaatatcattttaaccaatcaggaaatcgaacacaaaataaaacgtatcgcttatcagatatacgaaacttttgtggatgaagacgaagtcgtaattgcaggaattgcttcgaatggttctgtttttgctcaaaagcttgctttgtccttaacccgcatttcaacacttaaagtttctctttgcgaagttaaaatcgacaaacaaaatccacaatcacctatctacacctcattaaccaaagaagaatacgaaaacaaaggtctggttttagtagatgacgttttaaattcaggtactactttaatctatgctgtccgtcatttcttagatgttccgcttaagaaattcaagacagcagtattggttgacagaaaccacaagaagtatccggtaaaagccgatttcaaaggaatctctttgtctacttctttattagaacatgtacaggttgtttttgatgataacggcgacaactatgccttcttaagctaaaacagctaaaatatcctgaaccgtttcttcgacagttttatcatcaaccgtaaccttatattgggcctggttgtaataaaagcttctgtcgaacaaatgtttcgcgataaattctctcatttcctcttcattcatttcagcaattaaaggacgcttacttttattgtgaactaatcttccgtataaagtttcgatagaagcctttaaatagattgaaatgacatcttccccttttaataattcatgattattggcataacaaggtgttccccctcctaaacctattatacttctttcaggagaccggagcaattctacaaacatttcatgttctaattttctaaaataaatctctccatgtttctcgaaaatctcctttattgataaactagctctctcttcgatgcatttgtccaaatccagaaatggaatatttgtaatttttgacatattttgggcaatcgttgacttcccgcaccccatatatcctaacaatataatttttttcattttaataataccttataaactaagaggttgtaaattttacttaaaaaaagacaaatttataataaataagcttggaaatatccaaaataacttcttatatttgcacccgcgttcaagaaacgaatatgactcgatagctcagttggtagagcacatcacttttaatgatggggtcctgggttcgagccccagtcgggtcacaaattgtgactcacaatataagtttcttgacagcattgactcgatagctcagtcggtagagcacatcacttttaatgatggggtcctgggttcgagccccagtcgggtcacaaaggtcgagtattaatttacttgaccttttttaattttcggccatgtggagaaacggtagactcgccatcttgagggggtggtgctcgcaagggcgtgagggttcaaatccctccatggtcactttaaattaaaaagcctgcaaaaaattattttgcaggctttttttttcgataattacgtcttgttaatctctttagaaacaatcacaaaacgatcctaaattatcgcttctttttatttcgtccccaccatatcaaaaaaccactcaccggaagtaacgcacagaacaaagaaataaatgtcgccaatacttttgtaggaaaaccataaatactccccgtgtgaatagcataattactattcctccattttgccccaagggttttatcgttttgagttaccgtaaaataattttcagccgaaagactattataagtataactatcagattcatcccaacctgaattcccttcatgtttaacataagtagtaaccggaaccgcttccttagaagatttctcaggcaaagacaaaccaacagaaatccactcagatgtcttaaacctagaatccctaacaatatactctaagggatcttttacctgtacaacctccttattggagatttcaggaaccttagcccataccttttccggatcgttccctaaaagcctgtatatcccattcgtccaccagtcaaaagtccaaactaaaccggtaatagcaaaaatcagaatgaatacaaaagtataaatccctcctatgttgtgaatatcatagtttttacgcttccacctagtggtatttttccatttaaaccatatcctttgtttcaatgctgctttatttttaggccaccacaaataaataccagttaagaccagaataaaaataaacacagttgaaaatcccacaatataatgtcctacctcgtaggtcaacaatagattctgatggagcagcctcatattagatatccagtcgtaccttaaatcaacttcacctaattctttcccggtatattgatctatataaatactactataatttgcgtaatcagaagcagccgtccaatgcggcttagtattctcttcataacttgtaaaaacataggactttttcgggtctttactaatctccacataatcagcaagtggatgttttttctgaacaatcaccataagactatccaatggtaaaaccacctcttttacttcaggtacaaataatttttctttatgataccatgaagacaattctttttcccatacataaatactggctgccaacatacttacaaatacaacaagtccacacataagcccaagccatagatgtattttatttaatacttttctcatctaaattattccaaaaattaaaaattaacctcaacactaaaaagaaaaccacctgatacgtcgataaaatttccctgataactatattctcacctaagcattacgtatcaaaatatgactcgaagtgattgcaaaactactcagcaacaccccctcattcttctcatgttttttttttaccaaaagtaaattattttaatttgttccaaataaaatatacaaataatattaaaacaacatcagcacttcatatatttgcattcactaagaaataccagtaaaacacacaaacaaaacacacttccccttaacccttcatcatcatacccaaaacagaaatacaatatttaaaaaaacaaaaaaactaccaatattcaattccaaacagatcaacaaaacactgatttgctgatacttttttttaaaaaaaatcttttatctgagatattttctctagggttttgtaagttttttaacaatactcataatttcttctaaatctttagctagtattatgggatcaataaaacctaagccagaaattgcaccgatcttgaaattggagtttaacccaatatacattatttttaattcttcgataacaagaatgtcagatacagccttttctgcattgaaaacttttgcatcctcaaaaaaagtttgataaaaaagggaaaatttttcaaatttttcaatattgtactcatacagttttttatcaggagctgtccctctaaatttttgaaaagcaaaatttgcatcgttcctactaacgtcatggtcaccaggaattattaaaatattatctttagttatagccagttggctggcgatcaaattgagtatctcaactaattcgttaaattcattatcttgtgctgaatttgacagatccccagatataacaagataaagaatggtatctggaacctgtttttttacaaaatcacagaatgaggttatgaatctttcgttttcgggctttttatccgctatcagccaagaatgaaatttatcttgcaaatcaccgtttgggtcaaagcagcttgtaacatgtaagtccgagatatgtaaaattgcactattcattagtctagagctgttttaattttaaaattgatttgtgaattgttagccttgttaatattaaaaacacttaggtttttcagcttttcgctagcaatatgctcttcatttaatgtatctagtttgacaatgctgacattaccgataaccttacctcccagaaaagaaataatgtttttagtaatctttacctctgtacctagacatacaacatctgagactattatgtattttttatcttgttcaattttgctattcaggctgctatagtttgtgtttataggacctacatggtccagaataagtacatccatctgaaggaaattggaaagaactgagctaatgaaagagctatttaaattttgacatacaagaacaggcttatcgtccatattttctatccaagcttcatgaatctttaatgctaatttgtataggcagaacattataaaactagtgccctgtgagatcattttttttatatctatatatgaggttaaatagacagaagatgatgaatgtaagaataactcttccgaatcggggcttttaaagtgcataatgaaatgaagtaattcttcttcgaaaaggctttgcggttctaagtatctcacggctttagaatcgttaccaaaatagaaaattgtaaaagtttcctcattttccatcttgtgattattggggttttttagaaactcttcattaagggataattggttcagtacattctgcttaaggtttataaagaccaatgattttaccttactcttgatttttgacagatcgtcaaacaaatttttgctggcattttcaatattttcaaaatcaagatatagattcagttcactgctgcctgcaatttgatctaaacagctgttaatcctttgcagggtgctgtcaaataattcagttgcatataatccaatttcggctgcaaaataactgctgctaatggtttgctctgcatgaagattgaaataaatcagttcctcattttttattaaagaaattagcatgttaatactttttaggtatttctacttcaatatgaactcccttgaatcgaacttcaaaaagtcttatagatgaatactttacatctgaattataatttgaaattatatttgtaatcagttttttaaattcatcccttacatgaagtgttaacttgctgaaagtctcctcaaattcatttctatcaattaccttagaaatatatttttgatgacaatcataaatctgacctcgaagtttaaccaatacatatagttcacgcatcattctaagggaaattatgatctgggcattatgattatgaagcctgaagtatccatcagaatttaaaactacagtggtcataagatcaaataatcctttcctgtcttttaggattgaataatataacgcttcaaagatggaataaaatgactctttaatctttttatccacatttagaggaattgtatcaaaaagttcattatataaatcaaaaagtttgtagtttgtatttactgtctgaatctgctttgattttaaagattcaaacagccctattccattgtctgaaatcgaaaaacatgttctttctttatctgtgaacattaatgcatatacatccgatttggaatgtaaaactccatttgttattagctcggataaaatctgcacataatcaaaaacgatctctttattgttactgctctcgttcaggataacttcaaaatggtctttaactttataagtatagtattcgattagataatccctctgctgttcaggagggagtgtgctaatactatttgtgataactccttcgtttagtgaatagaagcggactttatgctcaggtctctgtttatttgaatcaaaaaaacctaaaaaatccttattaaaggataagatatttttgtggaacttatgaaaatcaccagaaatcttaaaaaaatctgacctatctagaaaggctagcacttttttagtggaatgtgtattatacaattgcagtgttatactttccttgtgaaatttagaaagctggtcggcaagtgacaaaaatagaggaatgctgataggatcaaagtaataggtgtgaaaaaaagattctttttcatcttccccaattaaaaaaaaagttattttttcctgtggaaactgcctgtaaaaacttgcgacgctacctaaaaagcttgaataaaagtggaatggcgtaaaagccttattgttcaataaaattggtactcctttcattatttttttagatttttaaactttaaaagcttcctaacataagtgcaattctaaattattttattgtaatctgtaatgtaaaacagttgcattgaatccccatgacataacattatccaataaattgagtccttaggtaaatattttacattgagctgactaatataaagaaagataaaaaaagcaggcaacagtataaatacctgtttataattagatagctgttttttttagttatatttttaagcaggcacaaaatagaaaatgttttaaaaagaattttacgggtttccgtaaattttgaagtttaatttattcgttaaaaaaaagaatatttattcctatgaaggtaatctaataatctagtacttttcgatgtatggaactgcattttgaagattttacgctaacactgaaagctgacgatctgggaagcaatcccgatgagatactgcacgctttccattatttggtcgaaaacttccagccgagatggtcgtccattattgtagagcaggggcggtcaaaaaagaggttacaatcgagcttatgtatcaggaaatattttaaaagacggcgtatggatttagaggacggaatcgaaagatatgcatcggcacaggaaaatgtgtaccgtcaggcattggatgaaataaaaaatggcaggaagaccagccattggatgtggtttgtctttccccagatcataggtctgggattcacggattacaatatctattatgggttaaaggggctagacgaagcaaaagaatatctcgataaccccgttcttggttagcgcctggtgaaaatttcgcaggcggttctggaccttcaggggaaaaccgcattggagattttcgcaaagccggaccagcgcaagctcagatcctgcatgaccctgttcagtctcttgccgaacacggatcccgtattccaaaaagtattggataaatattatcagggagagatagatgagaagacagttgccattcttgctacagatccacaaaagtaagggtaaccgttctgcgttgcttttgaaattatacaataaaaatacctaatccatgctgaaattgcaaactgaaaaaatagaaatagatttttcgaaattaatgttatgcaagtctagtttatggatttccgtaatttgatatgccttttaattcagttatttgatgacaagtggctaagcataatgaggcaactcataaaatgcttttctgaaaactaaatgaaataagctgttttaacagatgtagaatttgattcatttgctttagcctaatgaagtatattatgttgaaaacttagaataaattgtgttaaaaaaagaggtaaattgcaaaattacttaaacaagaatagaaatggcagattcagttttagcgatccagaaaggattcgaatttcaggctaagtttttttggtataaggcctgttccttatatcgaccggggtcaacggcagtagaggtaacgtatgaagctgatggtgttcccggatttgatgacgtaacggtctcttttgatccaccaaggttaagcacatatggctacagcataagcagggaatgttatcaagtcaagttccatgttgaccattccagagcatttgacgtggatgcgctgattgatccctcttttattggggctgtttctgaatcgcttctccagaaattgtacaaaaattatttagcctcccctgaggactacgctaaaacaaattactatatcataaatacttggggagtggaccaaaaagatgatctgattaaactgctcaataatgaaggagctgtaatcttcaagagactctttgacgggactaccgacaggtcacaaatgggcaagattagaaaaaaatggagagatcatcttggactctcagaggatcgcgaattgaaaatcgtacttaggcagctcaggattcgtgccaatcacgtttcaggggaatattttgatgagccactaagctttgctttagcagcaataaaccttaagcctttgcatgacgataaacgcaccagcccatattcatccctgattgtccgtcttcatgaggaaaaatcaaataggcttcacaaagataatctatatgcaattctggcccaagaggatctatgggttacaaccaccacgaatgaaaagattttcgctagtgcaggactgcgtacatttagaaaaggggctgaaaatatggaaatggagacagataaatgtttatgcctcttaaagcacttcgaatcacggtatatattggatggacctttgtggcagagtgaggttcttccaagcattgaagcattttcacaggagctgatcggtttgggaaagcccatagttctgcatctggatgctcatatttcgacggcatatgcactcggctattacatcggtaacaagtctggaactgatattaccatcgttcagaaatccccgaagggccgtgtatactggaaacctgaactggaggctactagagaggagactgagcagtgggactatacggaaagagatggcaatgcagatggggatgatctggtactctcgattagcatcagcaacgatatttcggcggaggtggatcactttgttgaatcgcacgtaccgaacgcggcagccgttttgcatgccaaagcaatttccggttgcggtttcagtgctgtcaggaatgctgatcatattatggagtatatcgtatttttaaacaggaaaatacgtacttggaaaactgcaaaaggaagagggaagagaatacacatctttatttcggcgccaaactctttcaatttctttcttggccagcaggcatctggttacggcagaatttcgctttacgagtacgatttcgagggtatccgtagcggaacttatgttcaatcacttaatttaccttaaacaataaatgggaaatataaacagttactttacagattttttaactggcatcagattaacacagacacagaaagatgatgccaagagaggccatacaacacttcgaaacaggttattggccgacgatgatttaaaggatatcatcgttacaacatttcttcaaggaagttacaggagatcaacagcagtccgaccaaatggtgaaaaaagagcggatgtagacgttattgttgttaccactcttgaccaggatagcactacacccgaagaggcattggagaaatttgagccttttgtggagaaacattacaaaggaaaatgggtaaagcagggcagatcgattggaatttcgctgtcctatgtcgacttggatatcgtggttacttccgcgccttctgaagttgacaagagcgggcttcgttcaaagagtgtgacaacagatctgacgctcgaagatttgatgacaggatcatatgactggaggctttccaaaggttggaacgagcctgatttgatgaaggcggtgaatctattgtctgagtcggtgcgtgcggaagccgagtggaaactacaacctttatggataccggatcgtgaggcagatatctgggaggaaactcacccgctggagcaaatcagatggacacgtgataagaacaagtcaactaatggctattacgtcaacatcgtaaaggcattcaaatggtggagaacgttaaaaattacagatttgaaatatcctaagggatacccaatcgagcatatgcttggagactgctgtcccaacggtattacaagcatggctgaaggtgtggtccttacctttgaaaaatttgtagacaagttctcggcataccgagtagcaggaatcgtaccagagtttcctgacagaggtgttccttcacataatgtgtggcacaggatcacaaaagatgattttaataagttctatgaccacatgaaaaattacgcggaaaaagccagggaggcctacgatgagaagtcacttaggaaggctacagagaaatggcaggaaatattcgggcctaaatttccgctggctccagaagacgacgacaatggaggaaccaaaaattcaggaccgacgggttttacaccgagatccggagttactgaacccgattcatctagatttgcataaatggaggagccatcagaaatcattctgcacggaaggaggttatgtgaacaaattactagctacaaactgcttgaagacctgagctggtcagtttcggaaaaaaaatgggtgcttaagtttgcgctttcaggggattttcaaggaacagacagagtgcctgttgaaacgttgtggtatgctctgatatcgaagaactatccttacggctcgctgtgtattttccctgcaacccaaggaggcataatatcgacttttcctcacatgaacattaatcgggatactggcaaactatggagatcaggagatatctgcattaaaacacagtatggcacttggaaaagtacatattttaataaggagccatttgatgcgtaccgccttcagtggtgcattaaaagaagcctattatggatcaaagccgccgctgaaagaaggcttcaggtagctggagatccttttgaatttccgcatatcccgaaggagagcaaaatattcaccagttggattttttctgaagaccctgaaatgtttcagaattggcaggtctcagggaacaaggggttactggaattctataaacctgagtttaatgccaatttagccgtggttctgaactacagccatgataatggttctgctgtcagatatgaatggggtaacctgctttcggattcaaagaacggtacagaggtggcattgtggttccgggtttccgacataccggttatcgaaccttggcaaattccacttacttggggtgaactgtttgaattatgtgaaaagaaaggatgggctttaagggaatttctgtttgataagctggtaaaaggcaggcttttggacaagacaaaatatttggcaatcggttttcctgtggcaccatttataggtcaggaacctgaacggatgcactggtttgcagtgcggttgcctggtcttcataaatctatgactggattcagaaaaaacaccgatgagtggagaaaagcccagttttcaaggatttatgctaagcatcaaagcattaaatggcttcattccgagaactggatgaaagaccagattacggcgcgaggtttggctaataggcagctaactgattttaaaatctgcataataggcgcgggttcagttggctcgtatttgaccgatcttttagcaagaatgggctgtggaagacttacgattgtagatgatgacggagcacaggtgggcaatttctcaaggcatacccttgatatgaagtcccttacctattataaagcacaggaagttgccaggagggcaaacaacacctttccgttcataaaagcagatttctgcattcaaaccattgaaaaggttttggagcgagagcctaaatttctagaccagtttgatctcattatcgactgtacggctgaagacagcgttcttagtatactttcggagcactgtactacagagcaacagattgtattttcgatttcccttggcatagaggcgagaagcctgctggccttaatgatgcgaagtccgatgcaggagctcttttctgaattcaagaaaaaaactaaagcttggtcagaagagcagaagcagaaatttccaaatccgcagttcccgttggagggaatagggtgctggcatcctatttttccagcacgaattgatgacattcaaggccttgttgcctgtacaataagacagcttgaaatatttttaagtgaagccgtacaatccaaactgatcataatagagcgtgatgatagtggcggtgtatcaattaaaactttactatgatttttatactaaagagtaccgggataaaagttgcgatagaagaccatcatataaaaaaaatgagaaatctcatcaaaactgcgggaataaatgaaacgggaggaataatccttggcagttatacggattcagcgacggcaacggtaagcgaaataatggatcctcctgaagacagcagagccggtagatattggtttgaaagagggataaaggggctgaaatcgatactgaccgctgcatggaataagaaccaatattatttaggtgaatggcattatcatccaaatggaaccgtagagccaagctatcaagattaccaacagatgagtaaaatatcaaagagtgaaaaatactactgtcctgagcccataatgattataattgcaggaaattttcaagattacaagctcggtgtgtacatttctgaccgaaatctaaacaaaacttttaaattggaacaatttacaaaggatgctaaatgatataaagatgaacagtaatctggttatacacaatgatgaagacagggacaaagatgattttcctataaatgggaaaggtgtccacattcatcttaatgacggtcaaggatatgtatttattccgctctacagcaatttttttattaatgttcctgagaaagcagggataaaattcgaccccaaaaacaaattggaggtgaacgcggcggttgatactcttattaatattcttgctaatggcttctatgataaactggagaccatttatactatcgatcttacagacgaatgtaaaagagctaacaagatacggactaacggacctgcaaaatttctagtaatcgaaatgtattttgattggataaataaatggcttaattatctgggaaatgtttttaattttgagttcaagcttttagtatatgccaaatataaggaaaagattaagaatgatctgctttttttggaaacaggtctgaaagagatcaatgcgcccataggccatgtgaaatttgctaggaaatggcttaaggaaacagattcgaacatgaattcggagggtaaggccagatcttctaaaaatgattacagggaagctggtcggctacaatcgaatatagatttgaaagttagaagccatctaaaagaggaagattcaaagcagatccggaatattctgataccattatcaggaaaatggaatcggacgctgattatgagtgaacctgattttgaaaggctggtgttgtacacgacccaaatttatgaaactggaaagctgcctgcaggttgcgaaaggtttcctcgaacgggtacaacagtcgaatttatgcgaaagacgatgcatctggtctatcttaatattaataaaaagcataaaacgtccttcatttctctactgcaccttttcaagcaactggaaaacacttcgccaagcaccacgagcagtaagttttcagtatacacaggtagctatgaagcagatctaaaaaaaatgatagaatattgaggttattttggtaatttaaaatcgccattgaatcaccacttttatttgcatcatattcaaatcagttatatatatgagagcaaataaaattaagttgagggtaaaatgggtcttaagaattccggtagcagatgccgttttgaaaatcagaataaaaaaaggaaacgtaaagttaaatgctggctttctgaattttaaaattactaaaaagatcactcactatgaattgattatcctactttggagaattgttggctttgagttaaaaattcgttcgctttggcagtttttaattcataattattagaattgatttcaatatttttggtttttattgcggatcacttttaaaaatagggaaacagaatttaccaacgaataccatagattctaatgaagagaatatttaagaaccgtattgtaaaggggcattaagctcgaaataaatagtagaatctttattgttttatcttatttaaaaatggaaaaataccaacatagacgtggattccagtttaacagctttttacgaaaagatgagcttcactgatttctgtaaatagttttcaatctaacttcaaaaaagaactgttatcaaagtatcgttaattttcatcaggatatatgacgcaaagcattactaatagtaaagcatagctattttttctttttgattactaaatgggatagggaaggatcatgtataagacgttccatttctgaatttacaatttcggatatgtcttcttttatctgcagataattgcgttcaatcattgtattgtttataatacgcaccgggctgattttctgatatgagccttcttcttttttaagctgctcgtgattattgattatttcagaatgaaatgttttgagttctattttacggtcaggattatcggccgtaatgcctacaaattcgccagaacttaaacatgaaatcttagaagcaggcactgcagcttccaactgttttgatctgctgattgatgtatcggagctgtttatggaaatgctctcacggtcctgcattatttttccaaaacgttcggagagctgtttagccgtatctccgctgacctgtcctgagacaatatttccaactatgttaacaattacatccgcctgttcgcggccgtaatccttgcgcagctggctgaagtcctgaatccccagacaggtgcttaccttattgcttctggccgtcgctataaggctgtccatattatttagatagatagtcgggaattcatcaaatataagactgcttttgatcctgtctttctggttcacctgcttgatgagcctgcttacataaagcgagagaacggcgccataggtctggattttaagcggattatttcccatgcagactatctttgggtcttcaggattatttatgtcaagagtgaagtcatttccagagagcacatagtaaagctgcgcactggaaagccttgccattgatatcttagccgaggctatctggccttccagctgctccatgacattctgaaggtaggcgctgacaaatggatctatcaaaatctctatttctttttcggttctcagcagcgtaaaaaggctgttatattcaacctgcatgagttcaattacatgaggcagggtgcagaactcgccgttattgtatttacgcaggtaccatataacggcagaaagaaaattgataggggattccacgaaaaagtctccctgtttttttatccattcacggtttaatcccaaaagaatggtgcgtgccgattcagatgcgtctgttatgtcgtccattgattttggatcaaggggattgcatctgtgcgtacggctcagatcatcaaaattaatgacatagaatttaggttccaccttgtataaatgcttattctgaagccatgtgttataggcaattatgctgaggtcgtcaaacttaaaatcatatacaaacattgagaagcctttacgtatgtgctgggttatgatatggcggatcacaaaataggattttccggagcctggtgttcctgcaactaagatgccacgaaagggatttatgatattgatccagctttttcggactttgtttttcaatctatattgtgccggcaggttaatggaatattcattttcaaggagccgttcttcctgtgggaatgtttcattttcactgttgaaaatatccttatggcggagatttcttcttatgatcctcgacaaaagtgttccgcccgaaatcaggagcagatatcctaagatagtgcagatcatataaagggccagttttttctctgggacagccgaaatagccagaaaaaagaagctcgaaaaataagccaatagccccaaagcaatataacagaacgcagttttgaagtccagcttttcattttttctgccctttgccccaagcaaagaaatgcataaaaatcccaaagaaaacagcttggataaatgaaaacaatcaaagagcccggtgcgaaatatattccccatcagtttattgccgaagctgcttaccagtccccatattttaaatacattatagccgtaataatagaaatgtagagctaacaatatcatgctgataagccttgtcatatccaaaatctttctaagcgcctgttcattttctcctgtctgcatagtcttagttttttagttagtaatctgaatgcccttttcctttttttcgtttcttttttcttttcagccgagagggaataaaatcagcagaaaactcaggctgcaggaccgagtcaattatcttctggagctcacctggtgaaataaaagagggctgtgatggtttgttttttaatggatcatcctcaatatttttaacggtggcgctgccgatgctaaaatttttgataccgcaccgttcttctatgcccgaagctgcgtaaggctttcctagagagcttccgttaaaaacacattttgttttatggtctatataggttaagccatagagaataccttgttcgtttcttcgttcagcagtcttgattccatcctggattagaattctgtcaaggccggaaactgattttatcctgttctgcataaaggcgagatcaactgcattttttactctttttaaatggaaatttctttctgccttgtttgccgcaaattttaattctagatttttaagggtgggtttcatgtaaaaactgctggcctttaagggaatacccacaggctgttttttatcgttaagaatctggtaagccagacctttatgaagaaacattcttgaatctttgctgccttgcatggcggtaacgttataaagattcagcactgcatttaattctcctacagttgtacatttataattaggaattactgcgtttaatacagcagcaattgcttttttagtttcagctgttccatactctataacactgctttttactggttttatatttaggatctttttcttttggctgtcctccgcagggatcagattgaatgccttttcaatttctttacgggctgtttcagattggttcctgcctatgttctgcatgtcaattctctttccgtcagacttcacttttatagacacgatatggatgtgcggatgtcctgcatcatgatgctgataaaccagatatggctggaatccaaatccgatttttaccatatacgaatgtgcaatttccatcagcttttctttcggcatttggttttcagttgaatcaaaatttagagatatgtgcacgcttccgcgcttgacatttgtatttaattcgagctgttgtaaaagcagtttcagccttaagtccttgcgaagttcggaggcttcaaccggataatttccttctcctataagttccgcttttccagcttcaattttattttcattgtaattgaaaatgcttctgactgatgaccccgtgtttatgactgcaaccatttttcagtaagatttttgatggccatttttatttcttcaatagaactgaacaacatttttttatctgtttcgtaacaaagaatccataatttgaattcagaaatctgggaaagcgtatgcagttttttcacagcctgattgaagttgtttccaatgggattcagctctgatctcatcttaattaattcgaacattagatcatcaagagctgtatttctgtattttaaaataacaggttttctaagtagatttttgcgggcaaagtcactcattttagggcagactgattcttcgaaatatttctgcagcatcttatattcgtcttcactgagcctgagatggagccatcttgttctgttttttttctcgtctttcatcatttttccttttcattcgacattacaaatcttccagttttcactgccagcgagttccgagcagagaggcagcaagatatcggttgtgatacaaccggacatcttgccgattgcaggaacgatgcaatctttgagtctctctaaagagtatggtacagtattaaggttataggaatttttacaaattttgtaaatatactctttaggtataaagtaaagctcgaatataacgaaggtagaaatgtcatgcaatcatcaccagattttgatgtgaataagatcaaaaggacctcttacttttacattaaatagtattaatttaaaaacgtgaagattatgacaacaaatgatgtggccaaggtttttgatactgtacttagtatccccggaatgaatgatgtagtgaaaattgatttgaaaatttcgcgaaaaaatgtgctgttactaaaccatattattgaacgtggattgtccagtaaaacggacgataaacaaacgattctcatgagtagtgccccggaagaaaatctacaggaattaaaactttttggagaggaatgtttgcaaaaagccggactgatagaactcagtgaaaaattaaaaatcctgagcgaaactgttaaaacataatagatcaaaaaagtgaaaaatgttagggtttaaataaatattatttgtttgtttaaatcctttttttattggtcaaatttacttatgtgcttctgcttttaaaactttaactaaaatagcggattttgacaaaatcatgccggattcttataacgttttatgaaacacctcattgtaattttgttttcggtccaactctaaacaattaaagaataataaaaatgcttttctttttttgaatttaattgaatttgaagtaatgttaagccatttatttaattgtaatgtaaaatgatttaacgatttaaaaccatgtacttctaattttgtaatcatatttattgatttagttaaaaattacttatcaaaagtattttttttttaacaaacatcgtttttaatttaaattaatcaccacgtaaaaacacctgatttttaataaaagtagattcttttaattgagtgattttacggaaatccataaaagccaatttaaaatctaaatgccctagccctgatagcagcgggatcctttttaggcaaacgaaaacgtttaaattaaaacaagaaatattctgcctaaaaagatacagtggatagcaggaacaagctcctaaaaaccatcctgattcgactaaatttcagctttaaaaaacacaaaaaaacaacactagaattttcggtaaaaattttgtaattttgcggtccaataaaaggaattagaaaatgttagatagacttcaatatgtaaagcagcgttttgatgagatttcggatttgattattcagccggatgttattgcggatcaaaaacgttatgtgcaactcaaccaggaatataaaagcatcaaagctttggttgaaaaaagagaagaatacattcttgttttagcgaatattgacgaagcaaacgaaattattgctgacggaagcgatgcagatatggttgaaatggccaaaatgcagttggacgaagcaaaagaacgcttgccgcaactggaggaggaaatcaaatttatgttgattcctaaagatcctgaagatgctaaaaatgttatggtggagattcgcgccggaacgggtggggacgaagcaagtatttttgcaggggatttattcagaatgtatactaaatactgtgagtcacaaggttggagaacttctgtggtggatatgaacgaagggacttcgggaggtttcaaagaggttatttttgaagttaccggagaagatgtgtacggaacgctgaaatttgaagcaggtgtgcaccgtgtacaacgtgttcctcaaaccgaaactcaaggtcgtgtgcatacctcggcagcaacggtaatggttttaccggaagcggaagagtttgatgtacaaatcgatatgaacgatgttcgtgtagatttcttctgttcgtcaggacctggaggacagtcggtaaatacgacgaaatcggctgtacgtttaacgcacattcctacgggattggtggcgcaatgtcaggatcagaaatcacagcataaaaataaagataaagcgttaacggttttacgttctcgtttgtacgaaatggaattggctaaaaaacaagaggaagacgctacaaaacgtagttctcaggtaagttcgggtgaccgttcggctaagattcgtacgtacaactacgcacaaggtcgtgtaaccgatcaccgtgtgggactaacgttatacgatttaggaaacatcatgaatggtgatattcagaaaattgttgccgagcttcagttggtgaacaatatggagaaattgaaggaagcgtcggaggttttttaagggactgaggttcttaggtgctaaggttctgagggtttaggctcaaaggtttttttaaggtactgaggttctgagatgctaagtttctaaggttttaggtgcaaaggtttctgaaaatagatataaaaaaggagtgtttcattgtttgaaacactcctttttttattattgtatatggattacagtttgaaaattgttgctgtaaaatgaaataattttgtgggatttagctggaaatgaggttttctattcttttttgcacttttcatgaagaatgtaaattcgaaaaaacctttgtccctttgaacctctgtaactttgaacctaaaatatagggcacagatcttagcaccttagcatctcagaacctcagtatcttagcgatttcctgattttgaaaccacattggtaacaaaaagctgtaacacagatccgaagatgtttttgaaagtcgaggtgcttttgccaacgacaaatcttttggccagataaccaattccgatactaatagccgactgtgcgagatcgctcttaaatccaaccgtttcgttgatttcttcaacggtgctgcgaatcaggttaagaggttttaaatgctctttaatgtcatcgatttcgtctttaatggcacaccattcggtattttgttggtgttctaaaagctgaattttccgatccagtgaatcaagggtgtaaatagtttccatgaccgtcttttttagttttttgattgacctgaatcagaatgtgcctcttgtttggtttctttcaatatactggaaacaatcatgtttccaataggagttttaataagcttgtgatgcgatttgtgcagtacaatggcaacaattaagtaaaacaaggccagtataaaaaaaccgtaatagctttctcccagtttttttccaatccataaactgattccgatattaaggaacagggtaaaaaatgcaacaacagcgccaactgcgatcctggaggtcaatgttgataaaacatctgccgatgctgataccgttttgagtttgattaattctaaactcgttttggtatagttctctgctttctcgtaaagatttaagttctcgtttgttgttgcatttgattccataataaaggggggattaggattaaaaaaacttcaccttttaatagttcgattttattgctttggcgtcgtccttaagagtgttgaagtcctctttcgcctggctgaattttgccttcccctcttcgataatttctttcccgtttgacttaatgttactaacgattccgtcgaatttggtttttatattatctccgtaatctttagacttgtctgatattttttttctggtatttgatcctttgtccggtgcaaataaaactcctaaaactgctcccgctgctgcggctcctaatattcctaaaattgtggtgctcgttttcataatattcgatttagtaattaatatatagtgcttaatagtgtttattaaatttcacggcctttaatgagcctcaataatatggcaataacggcaatgaccaataaaatatgaatgatacttccaaggctgtatacaaaaaagcccaatgcccaaagaatgaccagtaccaacgcgattgtgtatagtagatttgacatgatttttgtattaaggtttaattgaatcgttttcttagtttaacttatacgaaaggtataaagaaaggttgctgtttttggcatccggaaaagtgtaggttgttccggctaccgttctttcttttccaatagtagtgagtccgtagttgtaacgtaatccgatgcttattgggtcaaaatcgactccaacacccgccgataaaccggcatcaaacttgttcagatcatcggtgtcaatttcttgttcgaagttaaaatctcctctgccggttacttttgagcttaccagataagaggcgtaaccaccggcatgaacattaaagtttcgggtgatatttactctaaccaataaaggaacttcgatgtaattgagtctgaattttgaatctccgctggcaagagcgttattatattccaatttggctccttttgtagtgaacaggatttcaggctgaatggctatgaaatcagagacgggtaaagtggcgtaaagaccggcattgaaaccgtataatatgttttcgtcattggcatcactagagtataaattcgacatgttgaaccctcctttgattccatactcgggatttgcattagtgttctgagcatgcagcattccaaacgatgctgttaagaaaagggttaaggcgcataaaaaatttgggtacattttcatagttcgatagtttagttaataatagcgtatacaggcgtttagattactatttttgatttttgaatttctctgacaaactcatattgtttgggcaggtattgcagtaccatttctaaaatgatctgatcgttcgtctcctttgaaatcgattcgagcaatctgatctcttcttctaaagaggcattcatagaattcagataagccgcattgaaattggtttcgttggcatcgattaaatcgtataaatcccgcttatgggtggcattgatttcggtaataatgatcaactttttattggccagcgttgtaatctcctgtagcagctgattttgattgatttcgatttgtttgcttacttccagtatgttgttgtcagaacttttttgttgtgcaatttgacttttagaaataatggtttgacttgcatttgccgctgcgataaaaaaaaaggcttcaatttcttctttttcattcttggtaaaagcttcattttttaaagaagttgctactggatagttttttttacaggaggaaacaaaaactagtacacacaataggaatattgttcttaaaaaaaatgcttttactcggggaattgctttcattattacttcataaagtattactttacaaagatggcgacgaatggaggtttttgctttacaccaaaaaaaagaaacgttatataattcccataaaagatttatacaacgtttgttatgtggtttttaaagatttttttgaggggttaatccggaagaaaaatcgtaaatatggagccctgatcaggttgactgtcggccatgatatatcctttgtgattgtcgacaatttttttgcaaatggccagaccaattcctgttccgggataatctgttttagaatgaaggcgctgaaacaatacaaaaatagtttccttaaactgagggtcaaagcccattccgttatctgtaaaagttattttgtggtatttttttacattctgatctaaaagttctcgataatctaccgaaaatactttttgactttcaatggtaatttcgggagcaacattcggacggttgtattttaaagaattcccgatgaggttgataaaaagttgttcgatttgatacggaatgactgccagtttgggcaattttgtagacgtaataaccgcttttttctcgtcgatcatttcggttaattcagcttcggcatttttaagtaattcatttaaatttgatttaatgaattcttttttggtagtatttgttcttgaaaacaacaataaatcatcaattaaaacacgcattcttttggccgaaatctcaattttagcaatataatcattggcgttttgagacatagcagctttgtcggtatctgaaattcgggagataaaagtctgaattttccgaagaggttcctgtaaatcgtgactcgcaacgtgattgaaagaagccagttccttattgctgttttcgagttcgacgttacgtgcctgaagttctatgttgagtaagtgttcatcggtaatatcaaagttgattcccagcaaaattttgcttccctgttcgtcagtcaataatttccctgttgttttaaaatgccttacttcttgggtaggaagtacaattttataatagacaaaaggcaattgtttatagtttaggattcctttcatcgattttgctaccgtttctttatcatccggatggacaaagtttaaaaaggtgcctttttcgggaacgaaagcattaggttcgtagcccagcaggcgatattgattgtcggaatagtctattttgttggtgtctaaatcccattgccaggtactgaatttaccaatagcttcagattctgccatcagttttccggagattaaaagctgcttgttgaagactttcagacgttcgaaatcacgactaatttgtcggtaagccaatagaataaaggttaaagcaaccagaaacagtgaaatagaaaaaagcggactcagggaaatttcggcatcgtagatttttagtcttttggccaaatcagttttttcgatatcattcatttcgtctactttaaaacgaatgttttccatcaaaattcgtcctccaaacaaatgattgtcgagttttcgtttgtcgtaggttttgggatcgctgtatttaaggcaattttcaaacgaaacaaaacgctgaatgatgagcttgaataagttttgaagatttttctgctgtttcggattgtctttcgttaacttttttaaattaatgaaagaagtgtttaccttgtcgcgcgaataaatataaggagtcaggaaacgggcattgcgggtgatgatataaccgcgctgtcccgtttcggcatccttaatagccgacattaaccgttctaactgaatgttaatttcatacgtatgcatcaccagcttactggactcattcaggtcctgattgtgcttgtgagcaatagaagaaagaaataacagaatgaaaactgcgattacaaaaataactctcagtgagtttgaggaattaaaatttgggatccacttcattgatttcctactattttagtcgcaacagaaaattatcacgatttaaccctgaggtatgatagtgccagtttacagtaacgacttcattaattatttttttcagattgttaaaatcacttggttttttaatataaatattggcgccctgaataaaagtatcttcaatgtcttcttcagaagaggaagtagagtagattgcaataatgatgtcttttaaacgctctgtttttttaatttcgatcaggcattcttttccggtttttttcggcatgttcaaatccagaaataaaatatcaggtaaagcattgtcaggattcatcaaatggtccattaattgcattccgtcatgcgcaaattctactttagtctgaatctttatctcttcaaaagcatctttaaaaaaaaggcgatcgtcctcatcatcgtcagccaataaaatgtgtaatgcgtttttttgcattttaatataggtatttgtattttattttaaattctctcttcgtttcttaataattcgctgaaaagccgatggcgtaattccggtggtgtttttaaactgtgtactcaggtgtgctacactggagtagttgagtaaaaaagcaatttcggtcaggctcatttcgttgataataattaattgttttgctctttcaattttttgtaaaataataaaattctcgatagacgaataggttacttccgaaaatacattcgacagatacccatagctatgattgagtttttcggccaaaaacacagaacttttgtaattgttactgtcttccataaagacaagttcaataatagcatcctttattttctgtaccaaaacacttttttggttttctaccacttcaaaaccacaaggactcagtttcttttttaaggcctcgagtgcctcagcatcaaggttgttattgagctcaatttccccaaaacccaatgtggtaaagcctacattgtgctggtccagattgtgttttaaaaaaagcgaacaaatggtgttaatgtcgaactttataaatagtttcatttaatgaaaatttggttaaagatacttaatttaattttggttatatcgtttaacaattgttagaaatttactaatatttaaaccaactcgttggatgtaatccggaaaaataacattcaacacatcaaaaacatagtttttagtataaaaaaaataccgtctaatatttacactagacggtattccgattgagtcagaaagggttgcaaatctgattaggattgatgaaattcttcttttattctttcctgcttttaccgaagtctgctatccttttatctccagtaaacattcattcatcatttttcagagttgcgtattttgcttcagtattccttttaaactcattccgcttttattctatttcctgcaaaatcattaagcagtaatagcgatgtaaaattgcaaattactcgtcgttttttcgttacatttattcgtggaagtattgcataattcgcattttacagcctttaaacttaaatagcgttctgaaataattgttaatttgaatttttgtattaagtttttctaatgttatttcgataggaggtgtcgtaattatctcattaaaggtcagttaacaaattttaaattttaataaggtatttttcttacaaaaattattgataatatgattcaaatagtgtagttttgcgcccgaatttatctaattgaaatcaaattttaatgaaaaaaactttactcagtttattacttattgccattactttttcggccaaatctcagtcttatctgggatatacacatgataattatgcaggtgtacaaagtgttctttttaatccggcttctattgccgattctcgttttaaaaccgatgttaatctgttttcagtcagtgggacagtagcaaatgatctttatggtgttcgcctttttgacgtgtataaaaaaggatatgattttgacaagcagtctatcatgacaccggctaacgccaacaatggtttggttaattttgatatcatggggccttctttcatgtttaatattgctccaaaacataccattgctgtttttacaagagcgagatctattaccaatgcctataatgttaatggtagccttgtaaatgaagtgaaaaatggtttagatcatgccagtaactttaattttaacttaggtaatccaaatgcagtttctaattcatggggagagcttggagtttcgtatgctgccgttttatggcagaacgatcaacatttcttaaaaggaggtttaacagcaaaatatcttcagggaggtgtaaatggttatgttcagggtagaggagtgaaagtttcatttgtggagaacaaagccaacccgagagccagtacacttttttctgaaggagaagtaaccgtaggagcaagccaggactttgatgctaatgaagattacaagtttgatgctaattcaaatggtttaggttttgattttggacttgtttacgaatggagacctgaatacaaaaagtacgatctaaacaaggcaactagagccgacaataactttcgtgatttgaataaatacaaagtgcgttttggtctttcggttaccgatattggttcgatcaattacaggaattcaaaattagatacctataatgttaccggagtggtaacagagaaaatgatcaacgatgccgataacttgtatgatttcctgaacgagcactatacaaaaatttcgacttctaaaggagctagaaccaacttacctacagcaattcacgctgatgtagattggaatatgtacagaaaattctatttaaatttaaatggagatatcagtatggtgagtgattctaaattaaacggaagcagtattgccaatcgcgtgagtttaacgcctcgttacgaaagcagatggtttagtttttatgtaccgatgacctggatggaatacagcggaatgcaggtaggatcaggaattcgtttaggagctttctttattggttcaggttctgttttgacgaatctggtttcgaaagaatctaaagcggttgattttcatcttggggtaaaaattccggtttatcagaagaaattcaaagatacggatgaagacggagtaatcgataaagaagactcttgcagaaaagtagcaggtccggaagaaaataatggttgtccatggccagatacagacggagacaaagtttttgataaagatgatgtttgcccaagtgttgcaggtcctgtagaaaataaaggatgcccttggaaagatagtgatggagatactttattagacaatgtagatgcttgtcctgcagttgccggtccggtagaaaacaaaggttgtccttggccggatactgacaaagatggcgttttagacaaagacgacgcttgtccggatgttgctggtcctgcagaaaataaaggatgtcctgttttagatgcggataaagacggagttttggataaagatgacgcttgtccgttagtgtatggccctgcagaaaataagggttgtcctaaagttacaaaagaaacattagcacaattaaaagtagaggcgaagtctattttctttacaagcggaaaagcaactttaagcgacgccaaaaaaggagagaattcaggtcgattagatgcaatcaaagagatcctgaaaaattatccaaatgctaagtttgcgattaacggacatacagataacactggaaatccaaaagccaacaagaaattatctgaggcaagagcaaaagtagtaatggatgctttgattgaaaaaggagtaaatccggctaacttaagttcgcagggatttggatctgcaaaaccggttcagtctaataaaacggctaaaggaagagcagaaaacagaagaacagaaattgtatatttaggtaatttgtaagcctaaacagaatataaaaccaaaaagccattcgtaattgaatggctttttttatttttgcatacttctaaaatagaattatttctactctatttggagaactaaaaaatcaagaatgacaacacaacaactacacgaacaaattcttttaaaaaaatcatttttatgcgttggattagatcctgatctgactaaaatcccgccacatttattagaaaccgaagatccaatttttgagttcaataaagcaataattgatgccacgcatgatttagcaatagggtacaagcccaacactgctttttttgaggcttacggattaaaaggatggctttcacttcagaaaaccataaactacatcaacgaaaattttccggaaatgtttaccattgccgatgcaaaacgtggtgatataggtaatacatcaagtatgtatgccaaagctttttttgaagatctgaatttcgacagtgtaaccgttgctccttatatggggaaagattcggtagagcctttcctggcttttgaaaacaaacatacgattatgctggctctgacttcaaacgaaggagcatttgattttcagacgttaaacgttaacggaaaagaattatacaaacaagttttagaaacgtctaaaacctggaaaaatagccacaaccttatgtatgtggtaggcgctacaaaagcggaatattttactgaaatcaggaaaattgttccggacagttttttattggtaccgggaattggagctcagggcggaagcttatctgaagtttgcaagtacggaatgaacgataaagttggtttgttagtcaattcagcgagagccattatctacgcctcaaaaggaactgattttgctgaaaaagcgagagaagaagctttgaaagttcaaaaagaaatggctgtaattttaggtgataaataaagtttacagtttataatcttagttttcagcctcagttttcagtctcagtgcttgttgtggacgaaaactgagactgcgactgtaaactgcaaccgaaaactaaaacaaacatgaaacagttacaagatcagcttggtactttacatactttcgaaacagccccaaaacgaattatttctttagttccttctcagaccgagttgctatacgatttgggtttagaagaaaaaatagtagggataacaaagttctgcgtgcatccgtatcattttaagtcgactaaaaaaatggttggaggaacgaagaagattcatcttgaaaagataaaactgctccaacccgatattatcatttgcaacaaagaagaaaatacgcccgaaattgtagcgcagttaagtactatttgcccggtttgggtgaccaatattgtttcaattgaggataattttcaaatgatttctgattttggacagcttttcaattgcagaaccgaagctcagaaatggaacaataaactgcgcttcgctttaaacgattttaaaaaatacgttcaggacattcctgagaaaaaagcagcttactttatttggaagaacccttatatggtagccggaaatgatacctatattaatgagttattaaaactcaatcactttcagaatatctacggtgataaaggccgctatccggaaattgaactccggaaaatgcgtctggaaggcgatcctgatttggtttttctttcttcggagccttatccattcaaagaagaagatgcttttgaaataggacgttttacccatcacgccaaaactattttcgtcgatggcgaaatgttctcctggcacggaagccgattgttaaaggcttttccatacttcaaattactgcacgaaagacttaaaaattagtttcaggttttcttagtttcaggttgctttactttgaacataatttaaccgcaaagtccactaagatttttcgcaaagttcgcaaagttttatatgtataaagctttgcgaactttctgttttatgcaaaatcatgggcaaaaaaactttgcggactttgcggttaaatacacaattcaataatcctaaaccgcatattagtttcaggttttcgttgtttcaggttgctttactttgaacataatttaaccgctaagtccgctacgatttttcgcaaagttcgcaaagttttatatgtataaagctttgcgaactttctgttttatacaaaatcataggcaaaaaaactttgcggactttgcggttaaatacacaatccaataaccttaaactgcatatcaaattagcccaaaaaaaatgccggcatctcgaagacgccggcatcatttaactaaccaaaaccaaaataataaataaccagtttattacactacaaagatccaacttatatggatgttttgctgttaaggttttgttattactttgttggacataagttaagattctttaatgtgctgttttgagctttctgtagtgttaaataatttttggctattaaaatataaaaacaatcaattttgtttattaatatcgcaaagataagtttgtatatttgataaagtgttatatatcaaggatgtgtgatttcttaaaaaaattagcatttgatataaaacagttaattctaatcaaaaaaaacagaaaacaatgagtgattcaaacgaaagtaaatgtcctttccataatggacaaatgaaagaaactgctggtacaggaacctctaataaagattggtggccaaatcgtttaaatttaaatatattgcgtcagcattctagtttgtcggatccgatggaaaaagattttaactatgcggaagcatttaaaacgttagatctgaatgcggttaaaaaagatctttttgacctgatgaaagattctcaggattggtggccggcagattatggtcattatggtcctttatttattcgtatggcgtggcacagcgcaggaacgtatcgtatatcagacggtcgtggaggtgcaagttcggggaatcagcgttttgctcctcttaacagctggccggacaacgggaatttagataaagcacgttttttactttggccaataaaacagaagtatggaaacaaaatctcctgggccgatttgatgatcttaacaggtaactgcgctttagaatctatgggatttaagacttttggatttgcaggtggaagggaagatgtttgggaaccggaacaggatgtgaactgggggtcagaaatagaatggttggctactagtgataaaccatttagcaggtatagcggtgatagaaatctggagaatccgcttgcggctgtacaaatgggattaatatatgtaaaccctgaaggcccggatggtaacccggatccactaggttccggtagagatattagagaaacttttgcaagaatggcaatggatgatgcagaaactgtggcattagtagcgggaggtcatacattcggaaaagcgcatggtgccggtgatgcagcattagttggagctgagccggaaggtgccagcatagaacaaatgggaatgggctggaaaagcagttttggaagcggagtaggcggagatgctattaccagcgggattgaaggagcctggaaaccaaatccgactacctgggataatggtttttttgaaacgttgtttaagtacgattggaaattaactaaaagtcctgcaggagctcatcagtggacaccaacagatgaaagcgctgctacaacagtagaagatgctcacaatccggccaaacgacatgcaccgatgatgacaacagctgatatggcactgaaattagatcctatttacgaaccaatttcaagagattatttcgagaatttcgacaaatttgctgatgcttttgcgagagcatggtacaaattgacgcacagagatttgggccccgtttcccgttatttagggcctgaagttccaagtgaaatattaatttggcaagacccgattcctgcggctaaaagcgagttgacttataatgatattgccgctttaaaagataaaattctttccagcggactttctatttcagaattagtaaatacggcctgggcatcagcttctacattccgaggttctgataaacgtggaggagctaatggcgcccgtattcgttttgaaccacaaattagctgggaagttaatggaggaggacaagtaaaaaaggtattggctgttttagaagcaatacaaaatgattttgctaattcaggaaaatctgtatctattgccgatttaattgttctgggaggatctgcagctattgaaaaagcagcatcaaatgccggtttatctgtagatgttccttttacacaaggaagaggtgatgctactttagagcagacagatgtacattcgtttgaagtattagagccaaaagcagatggattccgaaactataaaagtgccaaaacaggagccattaccgaagagcttttaatagacaaagcacaattgttaaccttatctgtacctgaaatgacagtgttggtgggaggtttaagagtgttgaatgctaattatgacggttctaaacatggcgtgtttaccgcaagtaaagaaacattaagtaatgatttctttctgaatctcttagatttaagaacggcctggaaagccagtgatgaaaccggtgaagtttttgaaggacgtaatcgtactacgggagaggttaaatggacagcaacacgtgccgatcttatatttggttctaattctgaacttcgtgctttagctgaggtatacgccagcagtgatgccaaagggaaatttgttaaagattttgtctcagcatggactaaagtaatgaatctggaccgatttgatgtacgttaataaaaggttctaaggttctgaggttctgaggttctgagagacaaaggttctgagagacaaagggacaaaggttctgagttttgaacgtatattttttaaaagttaacccgactagttttttttaaaacctgtcgggtttgtttattggtctcagattcgggtttaaaaccctgcaatttattgcagtactttagtaatgcgaaaaaatctatatgcttaaaaggattagattgattaaaattgtttgccacgaatcgcacgaattaatacaaattaattcacattgattcttgaaattggtccgcctgtttgctatcgctcgggttgtacaaaaaaataaaaaatcaacacatagaatcatagatttaatttctaagtttagaacaaaataaaataatacattatttacacatagcgatctgtgttcatgtaaagtgaaacgtctttttttaagctttaaaaactatgtttctatgcgtcaaaatattttaagccttgatttcaaaaaataaaatctgtgtaaacctgttcaaatcgtaaaaaccgtgggcattaattccctcctattatcaatgcaaaactcactaaaaaatatatttcccaatttctccgacgaacttatcgcaacaattgaagaaaacggaagtctgcaggattttgaagccggaaccatcttaatgcgaaccggacaatacattaaaaacaccgtgttaattaccaaagggaaaattaaaatttaccgcgaaggcgaagatggcggcgagtttttaatgtactacctacaacccgggcaagcctgcgctatttcgatgatctgcaccgctaaaagcgaaaaaagccagattatggcaaaagttgtcgaagatgtttcggttatgatgattcccttgcaaatgatggacaaatggatgatggaacaccgaacctggtatgaatttgtaattgatacctaccgcagccgttttgaagaagttctcgaagtagtagacaatatcgctttccgttccatggacgagcgtctggaattttacctcaaacgacattcggatgcttgtggctgctctgaagtcaatctttcgcatcaggaaattgcaacggaattgaatacttccagagaggtaatttcccgactccttaaaaaaatggagcaaagaggcctggtcaaactcaaccgcaatcagattgagcttttaaagtaaaaacatttacttttttgttcttaaccattaagagattaagaaaaattaagagttaaagacaacgattgtcacattgagcgaaatcgaaatgctctgcgtgttctcgactccgctcgaactgaccaataaatttgtgtaattcgtggcagaaaaaaaacttatgtgataaatgttactgtagttttctttccaacaaagcatctttgcattaaaacaactgcaatggaatatttgggatattttgcttcaatcattatcgggatttcactgggccttattggcggcggcggatctatattaaccattccgattttggtgtatttgttcaaagtaaatccggagcaggctacttcttattctttatttattgtgggattaactgccatgtttggaagttacagtcattacaaaatggggaatcttaaacttaagtcggctttgtattttgcgattccttctgtcatttcgattttgattattcgggaagttatttttcctcaaattgcttctaccctgttttctatagcttcgtactcggtttccaaagattttctcattatgattatcttctctgtattgatgattacagcagcaatttcaatgatccgaaaaaacaaacccgaaacaaaagccaccgaaactaattatgttcaattaagtctaattggatttttagttggaattgtgactggatttttgggcgccggaggtggttttttaattattcctgcactgcttttctttgccaatttacccatgaaacaagccgttggaacttcattgttgattattacgattaactcttcgataggtttcggcggcgatttatacatcggaacccccatagattatacctttttactaggaatttctgcaatggcactctttggaatgtttataggaagtcagctttctaaaaaaatcgacggtgcaaaactaaaacccattttcggatggtttgttttggtgatggggttttatattattacaaaggaagttttgttttaaatttatttttttctcgcagataaagcagatttttattttagttaagtgtagaatatctttactaaagatgtaaaaaaaacataaaaactttatttttaaaccaaataatcacaataattgtcatttcgacgaaggagaaatctccgcgagaagctcaacaaagattgactttcgttgcggagttacttgcgaagatttctcgttcctcgaaatgacaaaagtgtacaggctaactttacacttaagtcttttttacttccaccaataataatagttatgttgaccgtcatattcaaaaccacagcgcggatataattggtttcctatatcatttgttttttcggtttccagcatcaaaccacaagcattggtttcctcacaccattctttactgcgatcaattaatgccacagaaaatcctttacctctgtaatcaggatgtacaaaaagatcatttagtaaccatagtctttgcattttagtagagctaaatattttatagagctgtacaaaaccaaccgcttttccgtctgcaatcgctaaaaaaatatccgactcattatgcaacaatcgttctttaagaaaggctttccctgcctcaacatcagatttctgacgatagaaaacacgatagaggtcaaaaagttcagctgtttcattaagatcttccaaacttgcttttttgatttggtaattcattattgtaaattttgagattaaaagaacgaaaatattctaaaacttaaactcttttatagtccagatttcataaaacgggatcatccagaacttaattcttttcaagagattcttaaacaaaaaaacaaattatctcttttactatttctattaaaccctgaattttgatcaagatgaaaacaaaaagaaattacaaactaaaaattacctacgttcgaaaccttgtgctctgaaagagccttagcaacaacatggtgcgaagcactatgaatgaaaatagattatgatgataagccctgaaagggcgaaagcctaatcacaaagaaatatttattatacatttttgagaaacatatattcttctttaatctattactcatttgcttttgccctttcagggcgatatttacttcttcttaattcgtagtgcgatgcactactctaatgctttaaggctttcagcctatttttaaaggtctcaaatcacaaaatttataaaaatattcttttccaactttacctaacaactctttttttgctaagccatctcggaatcaaacaaaaaaaaccgttggttaaaaccaacggctatgcatatcattaattcgtgaaaatttgtgaattcgcgactataaaatctaatgttccccatacccgatatcatccattttcccgctaaaaacacggtattgaataacaaaatagacaatcaccaaaaacaatgcgataaaaaaccaattcatcccagcgctcagtccgtattcgtgcgccgcagtgttgtaaatggttaaggacggattcaccttatttgtagagggtaaaacattcggaaaaatggaaacagctgttgaagcaaatccacctaccaaaaacaaagatgaaaacaaaaatccataaccgtcttttttccacgaacgtactttgaataatcctaaaatcccaacaaaagtcatcaatggaaaaaaccaaagaattggattctctacaaaattatggaaaggctttggctcaataaagtgccagatttgcaatgaaatacaaaccaaaaccagcaagacaatattcaatttaaaaacaacatttttaagctgtggattcaaagctgaattggttttaaagatgatccagttcgcaccgtggatggttaaggaaaccacactcacaattcccagaaaaagtgtaaaccagtcgataattcctaattcacttgcctgcggactaaaagttggattccacaatggcaaaaagaaataatgcgcctcctgggttgaaactccgttggtaaccataccaaggttgacaccgcgtacaatattacccaaggcaattccgaagaatagagccaacagtaaactcgccattccgaaagccttatcccagattgcttcccacatgggatgatgcacctgtcctcgcatttccaaaccaatggcacgaaagatcagcaaccataaaatcataattaaaggcagataaaatccgctgaaagaagaagcatacaaagtagggaaagcaaaaaacaaaacaccaccagcggcgataatccaaacttcgttggcatcccaaaacggaccgattgcatttgtaattgcttttttatctttttctgttttggcaaaaaataaatgaataattcctgctccaaaatcataaccgtctaagacaatataaacggccaaaattcccattaaaactacgtaccaaaaaaattccatacttatatattttcagttatgacttcagtgtgaggtcctttattgataatttttccaatcaaaagcaaaaacagcattccaagtaaaagatacaatcctataaatcccagtaaagtaaatagtgtatttccggaagaaacagttggagaggctccggctgctgttcgcattaaattataaacaagccagggctgtctgcccaactctgccgtataccagccagtcgtattggcaatgtaggggaatggcatcataaaaagcaaggaccagagaatccatttggtttcgtacaatttacctctgatcaattgaaacaaagccaaggacatcaaaccaataaaaagcgttccaagtcccaccataatatgatacgcataatacaaacctgaaatattagtaggatgaagatcttcttcaaactgatccaaacctttaatttcctgctcccagtttccataagtcagaaaactcagaatattcggaacggcaatcttgttgtccagttttttatctttaacatcaggctgtccaattaaaacaatttcagaaccctttttctcggtatgaaaaatcccttccatagccgcaaacgttacaggttggtatttcaccacatttttggccagtaaatctcccgttggaacagccacaatcatactggcaatcaatccaaagatcactcccgttttaagaaacagttttccgaaaacaatattctttttgcttaaaatatagaaagaaccaattcctgccacaacaaaagaacttgtcactaaagacgcggcctgattgtgcagatacgatggccacagccaaggatttagaaacagtgctttgaaattggtcaacacaaattttccgttctccagaatctcgtaacctacgggattctgcatccacgaatgtgttgcgataattaagtaaccactggcccaggaaccgatacaaattagtaatccggtgacaaaatgccatttatgtcccagtaatttttctccaaacaaaaacagtcctaaaaaggaagattctaaaaagaacgaaaacatgccttccatggctaatgtctgtccgataatccctccggttaactcggagaattttgcccagttggttccaaactgaaactccatcggaattccggttaccacccccatcgcaaaattcagggcgaagattctcatccagaaatgggtggcgtgattgtattgttcgtttttagttttgagatatttccatttgaagtacacaatgatcagcgaaagacccattgtaagttgcggaaaaagatagtggaaagtaattgtgaaggcaaattgcattcggtcataaaaaagcatttcttccatagtggtaatttatttatgaagtcccacaaatttacccattaaaacccgaaattcctgcctttaaaaaaagtttatcccctgataattgttaaacttttcaacaatttagttgtacaaactgcacttatgtttttaaaccagaattgtcattttgaccgaagggagaaatcgcagtagaaaacccacaaacagaattgccaatctttgtcgagcttcttgtgtcattgcgcgcgatttctccctttggtggaaatgacaagattatccatactattctttcttcaaaatccccttctccacactttcattaatcaaaccttctgcataattccataatgttttagagccttcttttatcacgctctttttctcgtacactttatcataacttacaccgaactctttccaggttccgccattgttagaagtattctgtaataaaggctctaaacgatccatcgatctggcaaatttagcttcgttggtctcacctgcttcaaattcttcccagatagcaattaattcttcggtctgttttttcggtagcaaaccaaaaatacgattcgccgccaatcgttcttcatcggtattcgaatgatttttctgtgaatcatatataaaggtatcacctgcgtcaatttctacaatatcgtgtatcaaaaccattttcacgactttcagaacatcaatcggggcatctgaatgttcggccaaaacgattgccattaaagccaaatgccagctgtgttctgcgtcattttcgtttcggtcactatgaaacagcttcgtttttcgctgaatgtattttaccttatcaatttcttttataaaagcaatctgattcaataagtcttctgtattcatttttgtaactgtttatttgttttaaaatgacattcgtcatgtgcaaaattataagttaaagcttaattgcacgggtttaaatcaaataatataacttctatgataaaatccgctttttatttcaccccgaaattaaatttctgtaacaatagtcacttaatttcccgaaaaacagacttacctttgtatcacattattttagatttcaaatcatgaaaatagaacaaatttacaccggatgccttgcgcagggtgcctattatattacttcaaatggcgaagccgcaattattgatccgttaagagaaattcagccttaccttgaccgtttagagcgcgatgaggtaaaattgaaatatatttttgaaacgcattttcacgccgattttgtttccggacatgtcgatttaagcaaagaaactcaagcgccaatcgtttatggcccaaatgctgcctgcgaatttgactgtatttcggcaaaagacggacaggaattcaaaattggaaatatcacgatcaaagcgctgcatactccgggtcacaccatggaaagcaccacttatttactgattgatgaaaacggaaaagatcacgccattttctccggagatactttatttattggagatgttggacgtccggatttggctcagaaagcagccgggatgacgcaggatcaattagccgggattttatatcattcgttacgagataaaattatgactttggctgatgatgtgatcgtttatcctgcccatggtgcgggaagcgcctgtggtaaaaacatgagcaaagaaacggtctctacaataggaaatcaaaaagcgaccaactatgcgttgcgcgccaatatgaccgaagccgaatttattactgaagtcacagacggattattgcctcctcctgcctatttcagtatgaatgtggcgatgaacaaacaaggttacgaaagttttgaaacagttttgtacaatggaatgaaaaccatcaaagcagaggaatttgaagccgtagccgaagaaacaggtgctttgattctggataccagaagtgctgccaattttagtaaagggtttattccacaatctattaatattggaatcaatggtgattttgctccttgggttggaactttaattggtgatgtaaaacagcctattgtattggtaacggaaaccggtcttgaagaagaaactgtaacccgtttaagccgtgtaggatttgattcgattattggtcatctggaaggcggttttgaagcctggcaaaaagcaggttacgaagtagacactgtaaacagaatcactgcgcaacaattttcaaatgagttcaaattcggagaagacaaaataatcgacattcgtaaagaaacagaatatgctgcagagcacatcgaagacgcgtacagcaaaccactggcttacattaatgattgggtaaaagacattaacccaaacgaacatttttatctgcattgcgccggaggatatcgcagtatgattgccgcttcgattttacaggcccgcggtttcagaaattttagcgaaattgaaggcggttttggagccatttctaaaacagaaattccgaaatcagattttgtttgtcaaagtaaagtactgaaataaagtcactgaggctctaagtcgctaagattctaagattttacctttgaaatttaacgacgagaccttattactaaaacacttaaaaatacaactcagaaccttagaatcttagtaacttagaacctcaaaaaaaatgcttgaaatcttaaaagaaccttggccttggtacgtttccgggccgctaatcggattaacagttcctgttttattgattcttggaaataaatctttcggaatcagttcctcgcttcgtcacatttgcgcggcttgtattcctgccaatatttctttctttaaatacgactggaaaaaagaaagctggaatttattcttcgtttttggaatttttctgggcggagtcattgcggcttattttctggcgaatccaaatccaatagaaattagtcccgaattatcaacgaaattagctgcctacggaattaccgattacaacggtttagttcctgcacaattattttcctgggaaagtttattcacgcttcgtggttttatcatgattgtggtaggcggatttctggtaggttttggaacacgttatgccggcggatgtaccagcggacatgccattatgggaatttcaaatttacaatggccatcattggtagcgacaatctgttttatgattggaggttttgtaatgacacttttgatcttaccttatattctttcactttaaaatttcaaaaatgagtttagaaaacaaaacagtcgacggcgaaggaatcaatgccagccagaaaaaagaaacagtctttggaaatcttaaatatttaatcgttggtatctttttcggaatcttattcgtaaaaactgaaatcataagctggttccgtatccaggaaatgtttcatcttgaatcatttcatatgtacggtgtaattggaagtgctgttgccgttggagtaatctccgtatttcttattaaaaagttcaacataaaaacactgcaaggcgaaaaaatcgaaattcagcccaaaacgttcagcaaaggacaaatttatggcggattgttgtttggttttggatgggccattacaggcgcttgtccgggacctttatttgcccaaattggtaccggtgcaactgttattgttgtaacgctgataagtgccatcttaggaacctgggtttatggttttattaaagacaaattgcctcattaatattcttatttaatatcatacacatcaaacccgacaggttttaaaaacctgtcaggtttactaataactaacagatgagccacacaacagaaaatttaattttaagaaaagcggatacctctgaaataccacaaatatggagtattctgcaagatgctattgaacagcgaagactggacggaagtacacaatggcaggacggttatcctaatgagctaaccattcgtaccgatattgaaaacgatcatgggtatgtgcttacagaaaatgacactatattatcttatgcggcgattctttttgataaagaaccagcctacgaaatcatacaaggtaaatggctcactgacggtgattatggagctattcatcgtgttgccgtatcgaaactcgcaaaaggtaaaggtattgcaaccaaactgtttgaaaagatagaaagtttatgcctcaaacaaaacatatacagtataaaagtagacacgaattttgacaatatcccaatgcttaaaattttagacagactgaaatatacctattgtggtgaagtttttttcagaggaggagcacgaaaagcatttgaaaaaaaattgatttagaaaataaaatcacaaaataaaacaaacggacccgacagattttaaaacctgtcgggttttattttgcctgtgattaagttctatagttttttaagacatttttttcgactaagagtattatcttccttttactttcattaagtttacaataccagatttaatcttacaaaaaaagcgaaccaatcacagccctatgaaacgctcagaacaattgtcgaaactagaaaatacggaacaatgggatgtaatcataattggcgggggagcaagtggtttggggactgctctagatgccgcaagccggggttataagaccattctgcttgaagcagtcgattttgcaaaaggaacctccagccgaagtaccaaattagttcacggtggtgttcgctatttagagcagggaaatatccatctggtcatcgaagccctgaaagaaagaggattactggctaaaaatgccggccatttagtaaaaaatcaatcttttataattccaaactacaacttctttgccggtttattctacaccatcggattgactgtttatgatttattggcagggcgtttaagtttggggcgatcaaaatacctttccaggaaaaaaacaattgaaatgcttcctgctgtagcagaaagaaatctaaccaatggcgtaatttatcatgatggccaatttgacgattcccgactggcgataaacattgcccaaacggcaattgaaaaaggagcctgccttttaaattatgtcaaagttgttcatttattaaagaacgatcaagaccaaatcatcggtgttgaagccataaatcacgaaacaggcaaaaagtacgaaatcaaagggtcggctattatcaatgcaacgggtgtttttacaaatgccatcatgaaactaaacgacacggtatacaaaaaatacattgtgccaagtcagggaattcatcttgtatttgatcaatcctttttgccgggcgaacacgctttgatgattcctaaaacaagtgacggaagagttttgtttgccgttccctggcacaatcgaattgtggtaggaactactgatactttaattcgaaaacacagtctcgaacccattgcgttagagagtgaaattgaatttgttttggaaactgctcaacgttttctggctaaaaaacccacaagagccgatgttttatctgtttttgccggtttacgacctttagctgcaccggaagaagaaggcaaaagcaccaaagaagtttcccgaagccataaaatcatagtttcagaaaccggattaatcacaattaccggaggcaaatggactacttacagaaaaatctctgaggatattattgataaggctatcaaaataggcaaattgcctaaaaaagcttgtattaccgaacagcttcccattcatggaaataaagccactacaaattcagacagaacaaatcatttatatatctatggatcagaccttcctaaaatagtagaattgctgcaaagagaacctgaactaaaagaaaaattacatccggatcacgaattcacaatggccgaagtggtttgggctattcgatatgaaatggcaagaacagtagatgacattctcgcaagacgtgtccgcttgttgttcttagatgccagagctgccatagcttcttctgaaaaagtagcgcgcctactggcaaaggaactcggacatgatgagacctggatccttagagaaataaccaactttcatggaattgcaaaaggctttcttctaaaagaatttcaatagatttatattaacttaaacctgttgagtgaaattgaattacatttaattttaacacatagaaacatagatattaatatccaaaagaggaaggcaaagcagaaacacctttctttcacctagtatattatctgcttttttaactagtgaaatgccttttttaagtttacaaagactatgttactatgtgttaaaacaatttcacccaccgggctaacttaaaaatatgcgatcatgcaggacaaattaattctggctttggatcagggaactacttcttccagagccattgtattcaatcataaaggagaaatagtcagtatttctcaaaagccatttaaacaaatttttccaaaaccgggatgggtcgaacatgatcctaacgaaatttggtcttcacaagttagtgtcgctgccgaagtaatagcaaaagttggaattacgggccgcgaaattgcagccataggaattaccaaccagcgggaaactactattgtctgggatcgcgaaacaagtgaacctgtctacaaggctattgtctggcaagaccgcagaaccgcaaaatactgcgacgaactaaaagcaaaaggacatacagaaatgatccagaaaaaaaccggattaattctcgatgcttatttctccggaaccaaagtaaaatggatattggacaatgttcccggagcacgcgaaaaagcagaacagggaaaactttgttttggaactgtagatacctggttaatctggaaactaacccgaagtaaattgtttatgacggacgtttctaatgccagcagaactttattattcaatataaatactttggactgggacgacgagttgctggcattatttgatattccgagagccatgctgcctgaagtaaaagaaagcagcgcgatatatggagaaacaagcactaccctattctctacaaaaatcccaattagcggggttgccggagatcagcaggcagccctttttggtcagctgtgtaccaactccgggatgattaaaaacacctatggaacaggttgttttatgctcatgaataccggtgaaaaacctattttttcagcacacaacttattgactacaattgcttggaaaatcaacggaaaaactacatatgcgttagaaggcagcgtttttgttggaggtgcagccgtacaatggttgcgagacggcgcaaaaataatcaattcatcagatgaaatcgaagctctcgcagcaagcgtgcctgacaatggcggtatttattttgttcctgctttgaccggtttaggagcaccacattgggatcaatacgcaagaggcgccatcgttggaatcaccagagggacgacaaatgcacatattgccagagctactttagaaggaattgcttatcaggtaaacgatctcctcaaagctatggaagcagattccggatacaaaggaatagaattacgagtagacggtggtgcagcagcaaacaatttattaatgcaatttcaatcagacatatttgggtctaatgtaacccgacctaccacattagaaactaccgctttgggagccgcgtatctggcaggactagccgtgggatattggtcgagtttagacgatctgaaagaacaatggtcgatcgaccaagtattttctccaaaaatggatcaggctaaagtaaagctactggtgaaaaactgggacagagctgttggccgcgcatcgcattggattgaagaataatttttaactactaactaaaccgtaaaaaatgactccttttatagcagaaattttaggcacaatgatcatgattttattaggaaatggcgttgtggcaaacgtattacttaaagataccaaaggaaacaattcgggttggatggtgatcacatcagcttgggcatttgccgtttttgtgggcgttactatcgcaggaccaattagcggtgcccatttaaatcctattgttacgttaggtttggccctgattggaaaatttacctggaatctggttcctgcatacatccttgctcaaatgattggagcaatgtcaggtgcttttttagtgtggctgtctcataaagatcattttgcagcaaccgaagatgaaggaactaaactggcctgtttctctacctcaccggcaatcaaaaacaatctctccaacttaataagtgaagtaattgcgacttttgtcttactattttcagtcttttatattgccggaccaagtttgcaaatcgcaaccgatacgaatgcaacaattggattaggaaccattggagcgcttccggtagcgatagtcgtatgggcaattggtctgtcattaggaggaactacaggttacgccataaatcctgcaagagatttaggccccagaatcatgcatgctattttacctataaaaggaagcagtaactggacgtatgcctggattccaattgtaggacccataattggttcgggattagctgccgcattatatttgacgattaattaatgcctaacaaacggagagttctgaaatttagggctcgcgggtttctcctattatgagctcgcgtgagggatagaagctatctgccgaagcagtgcggatagcccgacagcatcctgataagagggcgtataagcacaacgtaactttgccctcttaccgggatggtggcacgccctgctcagcattaaattacttctttatataaggttttgccaaggttttaaatttttgaaaaagcttagttcgttttaaataatcattaaataattccccaatcttgcattaaattaaaaacttatagtatttttaccatagttctatagggtggtttttataggatatttaaaagatgatatttggcactggaaagtttgggaaacaataaatcccaaagagatattagattttaaaatttcagcgaaaagtttaaatgaacttttaattcaaacgccaaattatcttagagaaactatcttattagattaaatgctattgtttccaaaattttgtttctctatttcaaaaattattattgctttatccgtcctaaatgttaatcataaaaaatcaattatgaatatcaaagaacaagtaattcaaaacttaaaaaattggttagcaaaaacaaaagtcatatcatatgatgagcgtattcctttgaattgctgggataaagaattaaaagatctaagaaacggaacagtaaaagaagtttacatagtatcatttaaaacaaaaagtactactatagagtataatgaaaaaggcgaagtaatttcttttttcgaaggaatgtactgctttgcttattttgatgccgaaactttagagttcctttatataatgaaaaaagctggatatattgaggttgacggctcttattaagtaaaaccaatacattttttaatttccctcattaataaaacaatgaaaaccataacaaaagttctattctttatcggagtttttctttttctcttcagctatattattgatccttataaaatcaatgaaggaaattatattgtaattgatggagatactgtcgcattcttaaaaatgctatacataattacatgcctgcttttcggatattcatcttatctatttcttagattttttagaagtagagtttatttcattttttctcttattttacttatcattaatctaatttttttagggaaaatgtttttgtattttgatccatttttaaactaaaattctaaaaaaaggttgtttatcttccaaagacaattccattttcaatctattaaacatccatttttccaaagaagaaaaacgggtgttatttatcatttattttcgtttttgtctgcaaaatgaaaccccaaaaaacacataataccctactgaaactactgatttacaaagtaaaatcttttttaaaataggctatttcggcgtatttttacagtgctgctaaaggcaatataccatcagtagcagcctccttaaaaggaacatctcagatttattgaagaccttttttcaaccttgaataaatttcaaaacaaataatcttatcgaatacttaaaaccctgatattttctaataatccagaggagctttttatggtctaaacttaaaatcattaatacctataaatatggatcaaactacaaaaaaacacattgatttactgcatccttcggtcagggaagaagtgaccaaaattatcgaagaatgtgatctggcgctggacggaagagcaaaagttagaataacacaaggactccgatcttttcaggaacaggaggatctttatgcttttggccgcaccaaacccggaaaaaaagtaacgaatgccaaaggaggccaatccattcacaattatggctttgcagtcgatatctgtttaattatagatggtaaaacagcttcctgggataccgtaaaagactgggacaacgaccaaatttcggactggcaggaatgtgttgaaatttttaaaaagcacaactggaattggggcggagactggaaaacttttaaagaccttccacactttgacaaaaaaggatacagcgattggaaggtgcttagcaaattaaagcgcgacagaaaaaactatgtaatcttatacaaataacgcagatgaaacctttcaaattaaaacgtacagctctcctacttgttttggcttttaccattacctcctgtacttccacaaaaacagctccattcgaccttcattcctatcaaaaaacaattgcagtaaaagtcgaaactattaaactaatggagaaagctactgccccttttgcggttcataaaatggaaataaacgctttattgcttgacattgaaaagttgactgaatatgaaaaaaataaactccataacgaaatcactttttcgatgtggaaaattctaaacgataaagacaagaatcttttggtcggttttttcaaaagatgggaaacaaaaggaattttatctcccgcttttatacaagaatccgaaaaacaagttttgcaagctctcgatttactgattcaatacgaagccaaaaaagataaagagtcaaaagatgctcttttatatttaatcaacagcaatacctgaaacgatgcataacgatacattatttgaccaattaaaaagcaaactaaaaattattataacagaaagttataaagataacaaattcgaactggagaaagatctgaacacttttctagaaatctccagagagaaaatggaacgctggctctttcttttctcaaccggaaatttaaccgaagaagatttagaatggctgtcaaaaagtcaattcaatttaatggaatttcaagcgcttcaagcaaccggaatatcaaaaataaaactgaatgctattaaaaacaacattctaaaaatgattttcaaagtactccttgatatggttatcccacaggattaaatctttgtgtttcttttaaaaaaaacaaacacaattcattgcaaatcaacaacttacaaccaacacctaacttactgaaactactgattcataagccttaaaatcttggtaaaagacaaattcgggcgtatttttacagtatcaaataaaaggcattttttgagtatggcgcgcagattcaaaggagctattcattaacaaaaaaacaaatagtaacgacatatgagagattttatcatagaagatgacttgttaatcaccaatggagatttctccattaaaaatgcagatcagcaaaacatagaacatctattgctaagtcaaaaaggaagttataaagagttccctattctgggagtaggaataaaaaaatacattaacagcccggatgcaacctccaggttaagactggaaaacgaaatagacaaacaattatcgtatgacaactttcacgtaaaaatactagatgtcaacgatttaaaaaacattaaaatcgatggaaactattaaaccacaagaaaatcaaaacatttttgatgtctctttacaagaatacggaagtattgaaaaagtattcgaccttttagacgacaacgacagatttaaccttacagaagacctttctgtttacaaagatttaaaaataggccgtgaagctttcaaaaaagatattgtagaatattacaatacccgaaacttaaagcctgcgacagctattacagaagaagaacagtatttactggataatttctccggaatcgattatatgattattgaagacgatttcatcatttattagcaacttgtttaggctataataacctgaacagcagcaacaaaagttcagcttatccaataacaagacttatccatttctctttttggaagtctccaaaaaaactactgctctgtagtattcacaaataaacataaacaattaactataagcatattacacatgtcttacaggctaaactatttcaaaaaattaaaatatggcacgtacaattgctgaaatacagaacgagattctgatggagaaaggaaagcaatcttccttaaacaacttaacagattcaaaaactgctatttggaaactttggattaacatagtggccaccgctatctgggttcatgaaaaaatagtagaaaaaaatgcgctcatctcaagaccgcataccttaaactggtacagaagccaggccttaaattttcattacggtctgtctttaccctctgatcccaacagcaaaataccactcatctggaaagagggctcctatcagtttgacactacaggttttgacgaaacagaaatcgaaaaattaaaaataatcaaacattgcgcagtaagcgaaattgatctggaaacagtactcgatcccacaaaaaacaaagaccgggaaactattttttcggactacttccgcaacaaagtaggggttgtatttttaaaagtagccacggtaaaaggagataaaatctcgagaattgatgttcctaatgaactctacgccttcaaagaatatatggctaaaattaaagatgctggaaatcatatttatatctcttctgataatggtgatatcttaaaactaaatttaaccgtttacgttgatcctttgaatatctatattgatccggcaaatcccgcaaatccaaaaaatggttcattgattctgaacgaaaaaatatttcctgtacaagatgctgtcaaagagcatttaaaaagtattgaatttaatggcgcttttgtaaaaacctattttgtcgatgctttgcagaatacgccgggtattaaaatcccagttgtaaataaagtcgaaactagctgggctaaaaatccgaatgaccaactagccccttctttagaagatgtcactaaaacggaatactttatccctaactcaggctattttgatctggatgccttagaggtactggtaaattatattccttatacattttacagagacaaacaatagcctaataccaatactatgaataaatacactgttttaaaatgggaaaagctaatattatggctcatcccgccggttgtcagaaaaaaaacgcatctggaatggctcaatgttttactggctcctcttcgtacgatttatgaagagatattatacaaaatgcagcatactgggcaggtcatttatctggaaaaagtactcaacgacgcttttaatcccacaaaaaattacgatcccaacctaagtatagagcaaaagcgattagaggggctaatttatatagacgaatcgatcaaacctgcaattcaatatgtctatctccacaaagaatactacgaaccggatattactttacccgacaaaaaggtaacaaagggagctttaatgaggccgcaattaaacatctttaaaaataatgagcttaaaaacagagataacaaacctgtttatctcgtacatcgtaaagattatactaaagtaaattatgccaattttagagtgtttatacccgaaaatctaattaaagatcgaacaataactattcaacctaaccaggacaatgctgtagaaaaaacagaaccgatcgaagtgaccgatttaaaatatcacaatcttcttaatttttataaactggcaggcaaaagctatgaaagttatcgctatcaaccgaaaaagcaaactggagaagttagaatatagagtaaagatactagaaaatagatttaagaatatagaaacaaaaaacaactgcaatttaaattaatacaaaatgaaacaaataaattttagtcatgaaggaggtttccctcttgaacaggaaactttagaaagacttcaaagcgcctacagaacggagttatttggtgctttaaaagcacattttagcatcgaaacctgcaaaaactatattgtcgctactgctacagagaaaaaaaatggctgggctattatccatctggataaaaaagattgtacagatccggaatataatgaagaaactccggaaggaattttataccctattttaaaagggaaaccaacaggatatttaaaaaccatccgaaaagacactaacctgatttacgggaccggaaaatctcaaaccgcctactttgattacgaagcagtatacatagaacaagctgaatatactaccggtgcttcacaaacggataaaacacttgcagccaattatcatattctgggaagttttaaggaaattttggatcatgccgccctggaaaagattttgactgaattagatactgccgttacagcaaatactaaggcaataggcgacaatactaaagcaatagctgataatgctaaattaattggtgataatactaaagctataggcaacaatactaaattaattggtgacaacactgacgcaattgagagaataaaagatacttatctccctcgtgacggctcaaaagccatgaccggaaatttaacggtagaaggtaaagtaaattttaataatgtagacttaacagatggcggcactttgttattattaaacgggtcaaatcaggttgttaagaacaatactctaatccaatctatattaaacgaaatcgaagctttaaaaaacaaatctgcgacagcaatacctattggaatgatcgctatttgggggaaatcggggccatttccgcaaggctggagagagtatgaacctctatcaggaagaatgccggtaggtttaaagacgagcgacccagcattcaacacattcttaggggatgggggaaataaagaaaaaaaattattgatcgaagaattgcctccacactttcatcacaaaccaaactctccttttaaaagtttctcagcgctatctaaggaattcggtgaaggaacttctccaggaatagctgcagatagcaacgaaaatgatgatgaggtggcagttgcgggaataaaagctgcatatggcccaaatggggatgctttagagcaaacaattggtaacggtcaatctttctcaattctaaacccataccgagtagtttattttatcgagtacgtaggactgcaaggcgacataacaaagccaacaagtccaacaaatttagcagcaacaaacatcaccgatacaagtataactttaaagtggactaagtcaacggataatatagcagttaccagttattccatatctataaatggtactaagtcaatcctggtaggtgacattgattcttacgttgtacgcgaattaaatcccgatacctattatagtttctatgtcacggcacaggatgctgcaggaaattcatccgctcccgccactcttgaagatgtaatcacaagaggaaactctgcacccaaccaaccaacatcaccaacggggttaagagcagccttaactggtaaaaataaagtgcaaatttcatggaatattgctacaaaccaaggaactggggttgtttacggaatctttagaaaaggcaaagggcttggagaaactttccagaaaataggtcaaactacggagatcttttacgctgatacaagcgtaaacagtgactatacccatacttattatgtggcgatactggatgcttccggactagctactgactatcgaactatggaagaagaagttaagggagatccgaatatagcggacgaataagttttgtctccataaaactgatgtgtaggtttgaagtgaaaattcaaataaaattatcagaacctgctgctttaaaacagtactcttttggggaattactccaaaagagtacctctctaaacaacctcaactctaaacatactctatgaaaattgtaaaatttatttttacagcttcagcattgctgtggctttttataaccatcctgatcatggcacaagtagccatccttatactaccaattctttttatttcgaaaaaacattacaccgaatggatcctctttacatttgccttaatctgctcttttggcgtttaccccatttcttttatctatgccgccatcaaatggaaaggctttctaaattatttaagaaaactcagtttaagtattgatatcacaggaaatatagttgccggtgccttactaaacgacaattttattaccagctcttctgcccataagtttggtgttgtacaggaaacgatcagcgacaatttaggcgaaaacgaaagagaccataccttatccgtttttggaaagagatttaccaatctgcttggcgtaattgattttgatcacgccaaaaagtctatagtcgaagattaattcaaccttaaacctatgataatgcatagaattacagaatattcaaatgaattaaaattattgctttacggaatttttatttacctggaaatggatgcagaaattgtgaaagtgctgttttatttaatggtattggatacttttttaggcattgtcaaaaccatcgtattaaataacccttttagctttaaaaaactggccttaggatttgtttccaagctggctgtactattgattccaacagctctggccttaatgagcaaaggcctcaattacaacttcaaatggtttgtaaccattgtaatggatctactaatcgtaagcgatggcatttcaatcatcagcaatataatagctataaagacaaaaaaagaagtcgagaatttcgatgccatgactttgatcttaaagtccataagaaatcgtttaatacaacttttcaagagaattttgattacaattgaccccagatatcatgtagaagaataatccaatacgctttataaacaaaaaaaataaaacaagcaataatgacaacaaatatcaatactattctgagctggttcaaaaccagatcaaaacctactcaggaagaatttcgcgccacttggttaagcttttggcacaaagatgagcagattccaacagaaaaaatcgaaggcttacagggccttttagatcataaagccgatttagaagctttagaaaaccacaaagctgattcaaacgcacactcagaattgtttattagagctaagtttattaaaactggggaattatccattttcaagcatcccaataatactgatcaaacaaaagaatacatacttgaaataaatgatctcgtccagggctttgttgaaaaaacctggataaatggatattacattggcggcgacataagtttacttgaaagctttagtgtaaatacaaatgcataaatgtaaataccaaataaaaaagaaaatcctcatagttcttgaaaaaagagccataaacattactaatcacaacatttaaattatgaaaagaatatttttatttttactccttgctgtgtcatttacagcattcgcgcaagttcaaataccacaagaatacactattcaaaaacctttacgattgggaactgttaatcctggtacaaaaacagattctgtattagttcggggttctgataaaattatcaaatttgttccccgaagtgaatttggcagaactagtgcccttcaggatttgaagtcagtgcttaatacgggtaatgtagcattaagtccaaacaattatagctggtttattccaaatctttccaacgaggctccctctattgattttggggttactgcattgaatggtgtaacagcaaattccatttcaatgacacccgaaaactttattttacagcacagctcgccggctactggtgcaacctattccatagaattacaaaacaatggtctgacctatggttcagacatgtcaacacattggacagcgagaagtattgtcgataaagcctatgttgatagcatcaatttccaaaaattagttgacaataatgcagttgcgaccttagataatggtaactatgctcaaatattaaacatcgataaagggggaaaccgacatgttggttttaatgtgactaatgaacagtttaaaagttctatgcttgaattaggaggaggagggttatttcaggcctttgcctctacagcaaatggctttggagaaatacttatgaacccggaccatagcggtgtaggagaaaatcacaaaatggctttaaggtatatacaatactttcctggaggaggccaagccgctgaaaatatattagtttttgagcctatgacttcatcaggtaagtccttagtaaaaattccatttaagtcaggagaacatttactggcaacaacaagcgatttagcgacagataatccaaccgtgtcaagtttaacacttactgaattaaataccacatatccaaatgcaataaatggctatagggtacattgcccatccatttcgacaggtgcgcttatgtatgagaaaactcagacgggctggttggaaatctctgtatcaattgtttacaatccccaataaaataaccttaaactttaaaacatgaataaatcaaaaatcgcagtaaccgtgagtcttttaattgttctaacaggtttcatcgacacaaaattcgatctgttacaggatgcaggattgtcggaaatagttatcaatagaattaaactcattggtttgattctgacggcagtattaccaggaatcagctctctactttcaaaagaagaaaagtaaaaagaaatttctacggaaaacattaaaaattaacctaaagcaattatttctatcttaaagaaagaacctttgcctaaatttgtaactacatctcttaccttatattcccggcaacatactgcgctgaaagaaatgataaagttaaatactaaaatctcctttaccctgtaacaattaatttccgattctaatatactctcctacaagcattaagaaaacaattgttgagatatttttataaaatcagtaattattctactactaccgaaataacaattaaaaatcaaaaacccctcttacaaaaccgtaagaggggctatatctatacatttcacattttacaacctacttcttaataaatttctgtacatagtttgctttatcagtcactatattaatgatgtacattccttttgaaaaatcactaacgttaatctgattgttactgatctgagcgttaattgatttacccgaaatatcatagaccgttacttttaacacctcgtcttctgttctaatgttcaagacatctgaaaccggattaggataaactgccagttctaattttgtgaattcaccagtacctaaattggttgttgtatttacggtaatcgatttttcaattagtttaccattggaattaaaacgaatcaccactgttgcagtaccctgagtttttggagtcagaaccaattcgtcattcacatttattacagccgaaaccacctctgtatcactaactgactttacagattttacgatcgctgccgacaaattatcagtatcggaaacaatattttttaaatcgattacagttggttcttttaccgaaacctccgaaggcagagtattgctcactacaggtgccgcattatccggaaaaacggtcgttccgggaaaccaataatagtcatccaaaatttttgtttgggttaaacttcctgtacgatcaaaagtatgaacccagtttttctgataatgtgctccaaatccgttttctgtagtattgagaatcaactcatctgaaaccggatcaatacgcagggctgcaccgtaaggaatttgtttaaaagcatctgtttgtcccggaatggttgcaaaattctcattaaaggtttttgaagtaatatcaaattttacaatttttgttcctgaagtaaaagaactgatggcgtttatccaaaacaaagcattctcctgagtgctataagtaaaactccccgcattccaggctccccaggaacccaggtatttggttgttggaatcgcatattcggttaccgtaaaagttgttgcattaatattgattaacttttgatcctgaattccccatacacttccgtctttggcctgaactacagagtggaatttaccggtaatagtcttaatcaaagtatgagtagcaggatcgattatcagcattcctccactttgtgttaccgcaaatacatactgagacgtacgaatcatattaccaacctgtcctgcagtacctgtacctgctaataaacttcccaccttcagattggcaatatcaaaaagataaataccttttgaagtacctatatatccagtgttttcattaactccaacaaacgaacgtccatctgctccaatgtttgcaaatcctgcaatttttttcatagtttttgcattagcaacaaccaatcttccgcccggactaaaattctgatctcctccgcttgctgcctgtttggaaataaaataaaaattatctccgtaaattgttccgtaacaggtggtcacgccaaaggtttcattgttattcgctatactataaattcggtaattagtacttccgtctttattaataaaattcacagaaccattggtatgtccgaaccagtcttcgtttaccataaaaaatccattcgtaaaatctgttgcttccacataaggtgcaaccggagtaaaagttccggcaataggaagcacatttttagacggtgcataattccaaacatcccaggaatcattttgcagaatacgaccggatgcccctatacttacggcagtaaaatcagcatcggcaggatttttcccccaatacgtccattctccatttgtccatccggattgccagtgatcgtttgtatctattgctttataattgtcaaaatcgtaagccgtcgtattcacaaagccatttgttggataaagaggataagtataatctgtgcctttataaagtccgatcgttttaattccattcagatcaaaacccaatcctcctgtcaaagatcctgtttgagctcccttatacaacagagcgaaaaaacgtcgatctgcttttagtatggcttttaacatgtcttcgcctgtggcagtaccctcccatctgaatccccagactaaagcatcggtatttttaccatcattccactgcaccgcaaaagccgcccgattagagcctgtgcctatccagtacttaatatcatcaaaggttgtcgccgcagtcgtgttttgggcaattttatttttcgctgctgtttgtttattattatttggaattgtgccctccgataccacctgacctcgtatagaaaagacagaaaggaacatcaatactaacaagtaatttttcttcatattcaatttaattttaattttttattatttaagatacaggtcataagctccggcaacatcagtagaaacttcgcccagccagccagcttcctgatggattgcggtatgtattttgacgaaatctattccgggaagttttacgtattttccgtttttgtctaccgcccaggaaatatcaatagtagaaccttcgtcgctattgggtgcattatctgcataaccaaaatcaaatcctgtacctacccaatagtttccggtaccactttgatcataaaaattgtctttaattctcgttcctttcaaggtataagaagcctccgaaatccatagcggatagtagctttgttcatgaaatccatttttggttttatatcctgaattcccctgattgtcttcccatttaatgtactgcacatcggtctgccaaaaatcctgacctgcaacagccggtttgttaggatccggtttgaaataagtcacactatagttcttcacggtggtacttttaaaatattcacttccggctatttcgtaccattcgtcctcatcaggtttcccgtttttatttttatcataagccaccagaataattccgggttcacaagaacctgaacgagtttcctttgtgtcattagcccaaaatgcatttcctaaaattttaaaatcacggccattcccatttggaatcgtatgatcaaaaccaaatacaacatagcctccaaatccgcctaaggatatcatgctggcattagaaccaacaagtgacttttttgcggcattgatcaaattactttcggtatttcccggtgcgtataatggaagttcattggtaaactgaccgactccgggacgaaattccagtacattagagatgtacttactataattcccaacctcttttgttacgttaataatcgattggaatgtttttacaacaccattggtctccacttttaacgttaagggatagctctttaaatacggactgataaaatccagttgaaggctttctgagatcactgaatctttaatactccaggttaattttgaattactatttaattttaaatcaatattgagcactttaaaacggtcaatggtataggattcttttaatacgtctccctgattctgatttccagaatcatcttcccgatcggttccacaggaaataaatcccagtaagagggttaatactagcgtactctttaaaagtgcaaaagggactcttttcatatttttctatttttattctttaatgacacatgattgttgaggtacaacaaaataaatttccagtgggcgtaacacttaactcttcacccttcactcttcacccttcacccttcactcttcacccttcactcttcactcttcactcttcactcttcactcttcactcttcactcttcactcttcactcttcactcttcactcttcactcttcactcttcactcttcactcttcactcttcactcttcactcttcactcttcactcttcactcttcactcttcactcttcactcttcactcttcactcttcactcttcactcttcactctcattagttgccagaggtacattatgaacatcacaaacacgaatcaacatattgatgtctacttcgtgggcatggctcgttaaaaatattattccccccaaacacttaaaatcacaaaattataaaaaactaacaaatcattttttataagatttttcttattacatttgaattgcataaaaagctccagaaacaaattttacattttataaatttaaaaatgataaaattatgtttaaaacagcaaaaagaatatcctgtctagtgttattctgttttattttgtcttgtcaaaatgaaccttcaaacctgcaagattcagcaactaaaagctttactaatggaactgtcattaacggtagattttacttttcctcgagagaaaatctaaaaagtgatcttgaaaatttcaaaaagaaaaacacaaaagacttagaagatcaatttgaaaaaatttatgagaaaggattcctatcaaacaccccaatagtggatccaaaaaatgaaatcctaatttcaaaactctctaacaaaaagaaagaactacagaagtctaacgatgccaatgaaactccggaagaagacagtattattcccgatccatattttgctgcagttataaaccaaaacaacgaaattatagttggagattcaatttacaaaatcacaaaagatctcggtgtactatccatacatataaatgatactacatacttaaaaaattatcttaaagagcattataattttaaatcatcactaaaaacaaaaaaagaggcgctgacagattttgatccctgtacatctcgcagccaatatggaggcaatacaaatctagattccaaaatatcaagatttatagctcctatagatattgattgtcgttcaatacaaattccttttccaaatccctccattttaaccttcataccacaattaacggaagatcaaatagtacaaaatcaaataaataatttacctatatgtgacggtcttcatgataccagctggtttcaaagtttatttggcactaaaagtcctgcattaattattttgacaattcgcacagaataaaaactgaattttggaatcaatcatggggcatatacagctcaattggtgttcaaacaagagttcaggtaaaaagattcggaatttggtttaaatctgaagcagatgaattacatcttggaataaacagagtaatattaaaatataattatccagatccaaaaattaatatttacaatcctttcacgacagaatcattacctccaatatacatgtacaataattattatcaagtattaggtgatggcaacaacttcaaacttgtcaatataacttccggaacaggcttaccattttttaaatttaataacaataatatactaaatatatacattagacaacttcctaatccgtattaccaaataaatagtgaatcaaacattaaacaattgtataatttgggcattaattttttgaaaaaggcaattaatagtgatccgaagaaggaatttgtaatcacccatcaaaaaaatgctaacgaaattgaagtgctttattttggtgaaagatacaaagctctcaacaccaataaaattgaaagaaaatttgatagtcaaattttagagttccttattacttattcaaacaatcttaactatagcactcccacatccgttaatccaacaggtgcaacaggaagcaatagtttttcattaaaaatagctaaaggacaaagctttagaaactacacttactatgaactggatttctatgcccttggtcgtcgaagagatatatggagcggcaataggatgaacaaaatataattcaacaaaaaaatgaaaaaaataataatactaattataacgctcataaattctattggctacactcaggatatacctctaaaaaaatggtattcggatgctcagtttgatctgatcattcataaaagggcaaaatatagttacagttattttggtggtgataccgaaaaacatacagtttgggacgaacaattaaacgtcaagaaaccagcaattggttttacatacacctacaattatatgctttttaaaaaattaagtattgggatactaacaggttataaaaactacacctctccagatttttctattttggaattaggaggaatactaaaattcttttttgtcgacacaaaaaacatatatacctacgctagcttaagcaatcaatttagcttgaataaaaatcaatttagaaatggtaccaatgcaagaattggcatcggattaccaatcattaaaagatattcttttagcctttctattaatctttttaaagaacaacaatttctgagattagatgatgcagaacctttgtttaattacaatcatgaaaccccaggcgacctcatatacagctcctatggcttaagcgcaggaatcaagttttaattaatcctcaaaactaatacagtattaaacagcgatttgaaacctgaaacaaaaaaaccgttacagctcgtaacggttttttttatattctaaaaagaaattctatagttgcagcgcaatggcattaagcagtaactgcgccgaagcttcattagttgccagaggtacattatgaacatcacaaacacgaatcaacatattgatgtctacttcgtgggcatggcttgccaacggatctttaaagaagaaaaccatttttgtctttccttctgccactctcgcagcaatctgcgcatcacctcccattggtcctgagagcattcttttcaccttaaaaccggcgttttcagctttactccctgtagttcctgttgcgattaacttaatgttttcctgaagcagtaaggtcttgtttttattcaaaaactgaaccatgtctgcttttttcccatcatgagctatgatagcaatttccatattctatttttatttattgatttgcaacgtggtaagcaattaacccatcaatcggtcttcttaaaacattacccaactgaagtccgtatttatcaaaagtttcttgtaattcgtcttttaaataaaaagctattgacccaacaaaatgaacaggaacttctttacaattgtcaaattgcttgatgtagtttttcacaaaagatttcattcccttgaagataatttttctgcaaaactcagtgtctttatgcttgatcaggaactttgcaaaggtcgccaaataagcatttggatttggttctttgtacaatttattcttgataaaatcaggttttaaattatactctttctcaaattcaactgccagttcttttggcattttattgaaatagtactttctgattaattcttttccaaaaacatttccgctgcagtcgtccattgcgataaacccaagtgactgaactttttgatgcaatactttaccatcaaaaaaactgcaattagaaccggtacctaaaatactcacaatggcagcttgtccttttggagtagttgcatatactgcagcataagtatcttcctgaacttctacaattgcattctcaaaatattcctgaaatattcgggaaagttctattttcattctctcggttccgcaacctgcaccgtaaaaaaacaaatgcgtagcgttctttttattttgcagaatatcaaaacgatcgtttaatctttctactatctccggaccgtcaagaatttcaggatttaatcctaaagtttgtgtggtgaataatacttttccattatcatcaattgcaatccaatcggctttagtagatccactatcaactattaatttcattttatttagtttttggattagtctttctttagctaaataaaaaatgtgtttttaccttaattaaagaagcaacaaaataagaaaatcccattactattcaataacgggattttgcaaaaatatatattattattttaaacctgcgatatgcacagacaaatcaatcaatttacttgaatacccgtactcattatcataccaggatactaatttaaagaaagttgaatttaaaccgattcctgctccagcatccactactgaagttcttttgtcagaaataaaatcctgagaaacaactgcatcttctgtatatcctaagatacctttcattgtagtttcggaagcgtttttcaaaacagccataatttcttcataagaagtttctttagctacttttactgttaaatctactacagaaacgtcagcagtaggaacacggaaagacattcctgttaatttcccattcaaagccggaattacttttccaactgcttttgcagctccagttgaagaaggaatgatgttgatgcttgcagcacgtccgcctctccagtcttttcttgaaggaccatcagctgtcatttgagttgaagttgttgcgtgaactgttgtcattaaaccttcaacaatttcgaaattatcgtgaattactttagctaaaggagctaaacagtttgttgtacaagaagcgttagaaaccactaaatctgtagcttttgctgtttcatggtttactcccattacaaacattggtgcatcagcagacggagcagagataattacttttttagcaccacctttgatgtgctcgtttgcagtttcgattgttgtgaagataccagtacattcagcaactacatctacatctacttcgttccattttaaatcagcaggatttctttccgcagtgatacgaatatttcttccgtttacaaaaagttttccgtctattacttctacagttccgttgaaacgtccgtgaactgaatcatattttaataagtaagccaagtgatctacatctaacaaatcattgattgctactacttctacattatctctattgaaagtttctctaaaaacgattcttccgatacgtccaaatccgtttattcctaattttacttttgacattttacttaattttttgttttttattacactaattcaaagtctaatttcctcacaataaacttctttccttttttaaactttttttatgtcgacatgatatcggacactcttaacaattctctgtcaatctcagatttacctttaattgcttgttcaagaggtgtcaaaacaactttatcagcctgcaaaccgaccatataatttgatttaccttctattaaagattctaccgcttttactcccaaacggcttgctaaaacacggtcaaaacaagatggagaaccaccacgctgcatatgtcctaatacagatactctaacgtcgtactccggcagattggcttcaacgtaatcttttaattcgaaaacatttttacctattttatctccttcggcaataactactatacttgatgattttcctgaagctttacttttttgaagagaatctaataatcggtctaaccctaaatcttcttcaggaataagaatttcttctgcaccggctccaattccggcattaagagcaatatgacctgcatctctacccattacctctacaaaaaacagacggttatgtgaacttgcagtatctctaattttatcgatacaatctacaacagtatttaaggctgtgtcataacctaaagtatggctggttccaaaaatatcattgtcaattgttccgggaatacccattaccggaaaaccgtattctgaattaaaaattaatccaccggtaaaacttccgtctcctccaataacaaccaaagcatctactccggcttttaaaagattttcgtgcgctttttttctaccttccgggcttctaaactcaactgaacgagctgatttcaaaatcgttccgcctttgttcacaatattatttacgctacggggtcccatttctttgaagtcaccttcaatcattccttgatatcccctataaatccctatgcattctatattatgataagcacatgttcgaacaactgatcgtattgcggcattcattcctggtgagtcacctcctgatgttagaacaccaactttttttatcgtttttggcattatttaagtattaaagtgtaaaattagcaaacattcaccacttatcgggttatctttataataaattagcaaaatatgttaaattcaaacgttttcgttaataagtttttctaaagcaaaaatttcattctccataataaatgttgcctatttaaattgaatatttaaaattaacaatacattactgaagtgttataaaatttaacagctatccctagcaaaaaataagcaagtctctaaaattaaaacaaaaaaaccattcgcagtaacgaatggttttttatctgtatctttttaacaaatcttctaaaagtcattgtcaggaattaatccttcattatttatgggtggaggaacttttggttcttcttttttctctttcttctcctccttctttttgttcttatctgcgttctttttattcgagaaattaacaaaatcaggattcaggttgttatcctgcaaatcgtttgtagaatttttgatcgctctttccagcctatgatttttgaaaagtttatttaccagctcgctaaaagtatcaaaatccacttcatacgaaataccaactccctgtgtataaccaattccttgtcctatataattaatatcattttctttattgaacaaacgaagattcatcgatccgtcttcatttacacgatacaagatttcgatatctccaacaatagcagattcatttactccacctaccggaactcccaattttccgttgattgtaattctttcattgatctgagaagaaatattcgctacaaactgaccgtcggcctcctgcccaagtcttttatcagcagagatataattcaaatcaatattgaccttatcattatctgattttataatacctcctaacaaactggaagcagtttcggttaaggtacctgaaaaatcgccctgactaaatccgtctgtactcataaacgaacctgtagatagcaaatacaaggcctgtgtctgacgaatgtctttatcgtctaacttatattgtatctctgatttaagcacagtactgacagaagggaactgtatatcaaaattaggctccggactggccaaatctccacgtaatccgattaccacctcaaccggaacttttttattaaatgaagaagtgttgtctaacagtactgccggatttgccgttgttttatagaccgcttccagatttaattgtgctttcattgggtttccttcccaaataattgatcctccttttttaacggagaattttttatcaattaaaccaccgtatttaaaattataagttccttcgtatgcctggaaatctccccacatattaaatttacccagtgtattaattttaaataataacgatccgtatccttttcctttcattccatgcccggaacttcgatctaaaattacctctacctcggcatcaggtgtaatatcaaaatcaaactccagttccaatccgttgtaattcttggtcttttcaagtataccatttgccagattgtacttttcctgcggtgttacaaaatgaatccagttgctttctccaacactctgggcattgtttataggaatcttaacctgagttcctttttctgatttcgcttctacttttataagcaatccttctgtaggacctttaatactggctgtaccatttataaatgccgtaccaaaataagctgcatcttcactgtctttagtatccagtgccagcaatcgcttagacgtaatatttaaatccagcttccagtcgccaaaattatgatgttcaatacttccattcagcaagccttttgttccgtatttggtatccgttagctgattgtttcgaaacagaaatttttcatctgttaagtcaatcacggtacgatcgcttaattcgtaatctgtattcaggtatgggatggtcatcccggctttctccacatacaaccgtccattaatttcaggctttttcagattccctaccacggcggcattccctgaaaccgaccctctcacattagaaagcacttcacctccaaccgttcctaaggtagccagattaaatccttcgagtttcaaactcaaatctaaaaaggtctctttattttcaaccgcaaaagttccttctgctttaaacgattctgtaaatccgttttggatagaggaattgatagtgaattttttaaaactttcatctcccgcaatatcaaaattaagcgtacctaaatccgttttattcagattcagatgatcaatcacaatagaggccgtgggctgataaacgtctttattctgtttgtaatttacatttccatttaaattaccattaaatacgaacttagaattaaaaggtgtgattttattaatatccacatcttcaaagttcaacaccaaatctttataatctttcccttttatgacaccattcaaatctattttttgattctcatgagacaatacaatattatcaatagtgaaatttttaaagtactgatcaaaaacaatctgattgtctttttcagcatcttcatttagataccataaatagtctttaaatttcatctcagacttcttaatccctacgatattgtttttatttttatcgatggtatgatagagatccagattaaaataatcttcccctttatcccctcctttaaattcggatcttacaaacagggtatctttagccgtaacgttaatcaaattaaaatcgcgtactttataataaggtgttttaatactgtccagctctacataagcattataaagcgtatttttattgtcgatcgtaattcgaatattgtcaaaggtatttttggcagcgacaattttttcggaattaaacttgaatttaaactcctgaagatccgaattaatttttcctctcactgtggtacttgaatcaattttgatgtccggatataacatctccactatcttatcgtacacatgaaagttgaaacgcaaaaattgccctttcttaagtttgtaaggtttataattggtatacaaacttcctactgaattcatgaccagcttgtccagttgtgcaaactgaaacttacctactatttcaccttttaccacgtcattagaaccaatagtaattgttcgcagtttatcggcatcaaaatgtgaattaactgtaagatcatcaaaaacataggtatcctgaggattttgatacacagcctctttaatcgaaatcgttccctgtaagttctctatcgaatttccggtcactgcgacaacggcatcccctttaaaatgtgaaatagaatcgcttataaattttagctttcgcaagtcggcattctctacgttaatatgaaaatcatagcgattttcacgcttactcaaatccaccattccatcaaacagtaaacttaaatttggatcatttatagaaacctgtcctttataataaggcagtttaaaattaccgttaacaacaatattattataggtgtatttattgtaatctaattttgcgatatctcctttaacaatggtattgaggtatttttcggtaaaccctaccccgtctacatctacattcaaagtcgttctaccaatatcttttcgattcagtaccgcaccaatattaaaattctccaggattacatttcctgaatacgaggctttgtcaataaaatcaatattattcatgtgcaaatcgacctgaccgttacctaaatcggtaatcattttaaaatcggtttctaaggctgtggtcgaaacttttgcttttccaacgatattgaatttaccaattcgtcgtaattcctttggaagtgttttacctaaaatacccggcaataaaacgaccagattatcgtaactcgaaaccagtttttcgaacttaccatccatagaaaacttctgtgttttgcttcctaaaagattcttgaagttaatggtcccaaagattcttgaaccattagtatcactcaatctaagacgtcttaaattaagatcattcaatgttccttttatttttgttttaattttaaaatgctggttttttcccaagccatcataaaaataacgaatatcatttgacgcaatggaagcagaatccagggctacatcaaattttactttatcggtaaaatgaagaaaatcctctattttatagttcagaattgcttttccgtaaatagaagatcttttggtctttatcgccagattttcaaccttgatctgctttttagtgtaactgaacttcccggcaaaatttgatacatacaacccacggtgatctaagaaagaaaaacggtgaatatttgtatttatatccggtccgtataacttaaactcgctgatgtacgcattcaattttttaaaatcaagaaatcttggcgtgtttttattctcatccacaacagaaaaagccccctgcgatatgtaagcattcttagcagtcaacaaaaagtgcttgttggattttggtgttttttttcctgtttcaaacagcttaataaacttgttgatattattctcgtcttcgtttttatacgttttgagattaaaaatcataccggtcagcctaatatcaccaaaaagcaaatcaccatctaataatcttttaatgctaagaatatcagtggtaatgatgtcagaatagattaaactcttcttatgatggtcgcgaatcagaaccttcttgagttttacacctccaaaaatatttatggcaactttttcaacactaatatcagtcttaaaatcagtgtttaaagattctgtaacatatctcgctattttggtctgaaccacaggcaaagccaagatgatagcaagtgctaacaaaagtaaaattaaaccaattagggttcgggatattattttctttacttttctgatagttgctatattttagttttcttttaaatttactttgaacagacaaagaacggctgtttttgataaaaattctttaattttggcttctccttataataaaagaaaatcaaatatttgattcgtcaaatataatccaaaaatcgtgcttttatatgcaaaattcagaggtttttattctcgccatcgaaagttcatgcgatgatactgctgccgcggtcctacataacgacaaagtactctcaaatgttgtggccaatcagctaattcacaatcaatatggaggtgttgttcctgaattagcttcaagagcacaccagcaaaatattgttccggtaattgatgccgcacttcgtaaggcaaatgtacaaaaagatcaactaactgctatcgcttttacgcaaggtcccggtttgatgggatctttattagtaggtagttcttttagtaaatcactgtcgttagcgctcaaaattccgctaattgctgtaaatcatatgcatgcccatattttagcacattttatcgatgaagaagggtttgataaaccggaatttccttttctggcgcttaccattagcggaggtcatactcaaatcgttaaagtaaacggtttttttgatatggaaattattggagaaactaccgatgatgccgttggcgaagcctttgacaagagtgccaaaatccttgggcttccttatccgggcggacccctgatcgacaaatatgcaaaattaggaaatccaaaagcctttacttttaccaaaccgaaagtaccgggacttgactttagtttctctggactaaaaacggccatcttgtattttattcaaaaaaataaacgtgaaaatccgaattttattgaagagaacctgaatgatatttgcgcttccattcaacataccattatcgaaattttgatggacaaattgaaattagcggtaaaagaaaccggaatcaaacaaattgccattggcggaggagtttcggctaattcaggcatcagaacccgattgaaagaaagcgaagcccaatacggatggaaaaccttcattccaaaatttgaatatactaccgacaatgccgccatgataggaattgtggggtatcaaaaatatttatcaaaacgtttcgaaacttcagcagtagtttcgaaagcgcgaattcaattttaattatgcaattattttacaatcctgatatcgacgaatctacagaacgcttttcttttgacaaagaagaaagccgtcatattataaaagttttacgcaaaaaagattccgatattctacacgtaaccaatggttcgggtttgttgtttgaaacccaaattactttagcatcagacaataaatgcatagtagaagttatttcgatccaaaaatcgcctgctccaaaattcagactgcatctagcagttgcaccaaccaaaatgaatgatcgttttgaatggtttttggaaaaagccacagaaataggaattcaggaaattactcctattttttgtgatcgttcagaaagaaaagtaattaatccggagcgttttgaaaagattattttatcggcaatgaaacaatccaacgaaacctatctgcctaaattaaatgaagccatttcgtttaaagaattcatcaaacaaaaaaacgatggtttgcagctaatcgcgcattgtgaagaaaccgataaaaaatctttaaaggaagttttgaagcccaatgaaagtgttaccctgcttattggaccggaaggagacttttctgaaaaagaaattgcactggctttagaacacaaattccagcccgttactttaggaaatacccgattgcgaacggagactgctgcaattgtagcctgccatagtgttgtgttttttaatgaaaattaaaccaggtattgttaaactgtttaatcgtttatttgttttgctgtttaaccaaaaatttgaaattgtttaaatttaccgcttatagttgtccccataattcataactcataccccataactcacatcccacgacttaaatgatatgaaaaaaatatttctattattactaatggtttcaatctcttccttttcacaggagattgcgttgttaaaatatagcggtggcggtgattggtatgccaatccaacatcattacctaatttaattaagttttgcaatgctaacatcaatacgagaataaaagcaaaaccatcagcagttgaaccgagtaatccggatctgctctcttatccgtttgttcatatgacgggacatggaaatgttgtttttagcgatgctgatgtaagtaatcttagaaattatttaaatggtggtggttttctgcatattgacgacaactacggaatggatcaatacatccgaaaagagattaaaaaaatatttccaaacaataacttaatcgaaattcctgccaatcatcccatatttcaaaaacctttcccgtttccaaatggtctgccaaaaatccacgaacatgacggaacacgcgctcaggcctttggtatctttatcgaaaacaaattggtattactctatacatatgaatgtgacttaggagacggctgggaagatcctgaagttcataatgatcctgtcgcggttagagataaagctcttaaaatgggagccaacattatcaattatatttttaccaattaaattttagaaagtgcagcttactcacgaagaaaatcaatttgaaagaaaaacatttccgataacattagtttgtgatcacatttattttcagcaaaatattggttctctttttagaatcagtgaggcatttggagtggaaaatatcatttttttaggaaaagatattccgttaactccccgaaaaataaataaaacttcacgaagcacccatcttcacgtagcccacaccatcattgaagaaacagctgacctggctgactatctgcttcaaaataatttcgagattattgctttagagatcgcaagcaacagcaaaccactaagagaagttctaattcctgaaaatcaaaaaattgcacttctaattggaagtgagattaacggaatctctgaagagcttttaaaaatttcaaaccaaattgtccacatcaatatgtttggaaagaacagcagtatgaatgttgtgcaagcggcaagtattgcactttatgaaattacttctttttaatttttttcaccttttaaattgtaagtatactacttactttgatgctagcttttgttgtttcttcgggatttactccaaatgaagaaacaacaggaattattgttcaaaatgtaagacaactgtcgtatggaatctcatggctaatttgaccaaaattaccattaatttaacagttattcttacgtataaatacttactaaaatttcactttgtaatatttgtcaaaaaaatcttccataaacgatgaaaatcgacacaataacattcttaaaaacagcattgtacgaattatatatttgtgttataaatataaaatatgagaagcattttaatcattggagccggcagatctgcatcgtccttaattcgttatttattggcaaaatcagaaagcgaaaacctacacctcgttgtagcagatctttctttggccctagccgaaaagaaaacacagaaacatcctaatgccactccaattgctttaaatatttttgatactgaagaacgaaaagcagccatcgaaaaagcttctatagtaatctcgatgctgcctgctcatttacatatcgaaatcgcaaaagattgtcttgaattcaaaaaacacctggttaccgcttcttatatcagtgatgccatgcaggctcttgacgaagaagcaaagaaaaacaatctggttttcatgaacgaaatcgggcttgatcctgggatcgatcacatgagtgccatgaaagttattgacgaaatcagagccaaaggtggaaaaatgctgctttttgaatcgttttgcggcggcttagtagctcctgaatccgacaataatttatggaattataaatttacctgggctccccgaaatgtagttctggccgggcagggtggtgctgcaaaattcattcaggaaggcacttataaatacattccgtacagcgccttatttcgtcgtaccgaatttctggaagtcgaaggctacggaaaatttgaagcctattccaatcgcgattctcttaaatataaatcggtttacggtttagacaatgtcctgactttgtatcgcggaaccattagaagagttggcttctcgaaagcatggaatatgtttgtacaattgggcatgacagacgacagctacatcatggaagattctgagaacatgagttaccgtcaattcgtaaattcttttttaccgtatcacccaaccgattcggcagaaatcaaaacccgtctgatcttaaaaattgatcaggacgacattatgtgggacaaacttttagagcttgatctttttaatccaaacaaaaaagtaaacctgcctaatgccactcctgcacagatattagaaaaaatattatccgacagctggtctttagaaccagatgataaagacatgattgtcatgtaccataaatttggttatgagctcaatggagagaaaaaacaaattgactccaaaatggtttgtattggagacgaccaaacttataccgccatggcaaaaactgtggggttgccggttgcaatggcaacgctgttaattttaaatggaaaaatcacaactcccggcgtacagcttccgataaaaaaagaagtatacctgcctattttaaacgagttagaagaatatggggttatttttaacgaacaaaaaatgccctattttggatataatccggatttgttctaagatctggattgtttgttttttagaatttttttttttagttttttattttatccgctttcaggttctggaagcggattttttttgaaaaggtgcgaggtacagaaaaacaaaattcaaatcctaaacttatttggctaaagccactcacctcattattcaaacctccagctaaagctggaggctattctattcaaaagaaaatctttaactcctttacccctctgcacctttgaacctttgtacctttgaacctctgtccctttaaaaaaacctatttctcagcctgaactgtaattggcaaactgtacatcaccctaaccgcttttcctttttgcgttgcagcagtccattttggcgaaagcttcaggacacggataatctcattccctatcccataaccggagtctttaattgttttaatatccgaaagactaccatctttttcaatagtgaattccatatatgtttttccttcaattttactttttccaactgccgccggcattttgaaattcttccctataaacttataaaatgctgtcatgccccctggatattcaggcaatttctcgacatcttccagaacataaagatctttctctttgatatcgcctttgattggcggtttttgagccattgtttttgtactaaaaacaaacaataacaaggcataaattgcacctacagtaaatactttacacacaattttaatcggagattcttttttggtcatcataagtaaacgttttttagttattaaataattgatattgctcgccagagcaaccgtatttttattggaagcaaaatcaagcaataaatattgatagcttttaacctctctaaatcgaacatttacagcttcatcggccagaaattcatgattcagtttaattgcttttttataaagaataagcaacggattgaaccaaaaaacaatctgcagcagctcaataaaaagaacatccaaggtatgcctttgctttaaatgtgcgttttcgtgtactattaattctgatggaatcttaccattttcaaattctgttttattaacaaaaattgatttccagaaagagtacggcaagcccccttcctgaaccagtacgatcttttgtccatttacaaactgtatctcattgctctgtgttttcttaaaaaatgaaataaaattccatacaaagcgagccatcaacatacaaaacacagcaccataaagcactacaatcaaaaccaacagaaagtcattggccgagattgtattaagccgtccagtacttctctcgagtaccagttcattcaattgaaccaacccaattctatctgtaacaaaagatccaatcgagataatttgcaacggaattacaaagctaaaaaccaaactcaccagcaaatacgcacgattaaaacgaaacattttttcgttttccaataccattttatatactgcataaaaaatcaaaagcagtattcccgattttaaaagatagcttatcattttttctttttttgaatctgtgaatcaattatttttctgagttcttctaattccgatgttgacaaatcggtttccgttgtaaaaaacgaagcaaattgagaagccgaattattaaaaaaattactaattaacccgttgacatgcttagagaaataagctgtttttttcactaacggatagtattctcttgaatttccgaattcattataggctacgaattttttgtcaatcattcgtttcaaaagcgtcgcaactgttgttgttgccggttttggctccggatacgcttcgagcaaatctttcataaaagccttttcgagcttccagagatgctccattaattgttcttctgagtttgataattgcatttgtttaaggtgctaaggttctgagttactaagttgctgagttttttttgccacggattgaaatgatttcaatgattcccctgcatgccacactaattctataatctttattctattctctttgttctttgttcttctgtctactccaccatccgttccgaaatcaactcaccgttatcgtattttttaacttcgactaatttccctttatccgaataaaacttccaatcaccaaaataaaaccagtgcgtttctaccgaattgacttcgatttttgtttttcctttggattgtagttttccgttttcgtaataatactttacgagacagcttccatttttatatttctctgttttataaatttttccgttgatatatgatttccacttttttattggctggtcgtgtttgtaatattcaaacgatttataaactgtactgtcttgcttgtaattgtcaatccaggtaccttcccttttcttatccacaatctgattgatcggtttgcttttgcatcctaaaagcattactccacaaaataacaagaataccagttgtctcatttgattattttcattctacaattatagatgttgttctacaaatgtagagttatttttttaatatgcaagatttttttttgaaaggtgctgagattctaagatactaaggttctgagggtttattttttgaggttcaaagtggtaaaggttcagaggtgcagagagacaaaatctgaattgccgccagctttagctggagattaaagaaatacaggcatttattggctttagccgaaagcccatccgccacggcagaaacacccataaaaaaatccgttcatttctgaacggattttacatcttaagatttaacttttacgtcttagcgaaccaaaaaaacagcgaacttagcgtaaatcgttgcgttctttgcggttaaattacttcgaaagctctacaaaatatttgtaaaacaacggaatagtctcaattccttttaagtaattgaagattccaaaatgctcgtttggcgagtgaatggcatcactgtctaatccgaagcccattaaaatggttttactttttagttctttttcaaacaaagctacaatcggaatactacctcctgaacgaaccggaattgcaggcactccaaaagtctctgtataggctttgttggccgcctgatatccaatactgtcaattggcgttacataaccctgacctccgtggtgtggcgttacttttaccgtaactcccgccggagcaatgtttgtaaaatgcttagtgaaaagttctgtgatttcttcccaatcctgacccggaaccaaacgcatcgagatcttagcaaaagccttactcgcgataaccgttttagccccttcaccggtatatccaccccagattccgtttacatctaaagttggacgaatagagttgcgctcattcgttacatatcctttttcaccgtaaacatcgtttagatttaaggctttcttatatttttctaagctgaaaggcgcttttgccatttcggctctttcttcaagagataattcctgtactttatcgtagaacccaggaatcgtaatatgattgtcttcgtcgtgaagcgcagcaatcattttggctagaatattaattgggttcgctacagctccaccatataaaccggaatgtaaatcacgatttggtcctgtaacttcaacctcaacataactcaaacctcttaaacctgtcgtgattgatggttgttgattcgaaatcattcctgtatcagaaattaagatcacgtcgtttttcagtttttcctgattgcgttctacaaaccacgctaaacttgctgaacctacttcttcttccccttcgatcatgaattttacattacaaggcaatacattgttctgaaccatgtattccaacgcttttacgtgcatgtacatctgacctttgtcgtcacaggcaccacgagcgaagatcgctccctcaggatgaatctctgtcgttttgatcacaggctcaaaaggtggtgaagtccataattctaatggatctggcggttgaacatcataatgtccgtaaaccagaaccgttggtaaatttggatcgattattttctctccataaataattgggtaccccggagtgtcgcaagtttcgacaaaatcgcagcctgctttcgataaactttcttttactgcttcggcagtatcaataacatcttgggagtatgcagtgtcggcacttaccgacggaatctttaataattcgatcaattcattgataaaccgatctttatgttgttgaacgtaggacttaatattttccatttaaattatttttatagaaatccaaaagtacaaaaaagagaattaatatttttttcgaaatttttcattttttttctttgaatattcgaaagtatgtctatctttgcacccacaatagccgcggatatggtgaaattggtagacatgccagacttaggatctggtgccgcaaggcgtgtaggttcgagtcctattatccgcaccgaaaaaaagcttctgagaaatcagaagcttttttgtttttaaaaatatccccctctaaaagcgatcaggtgcaaaatacctatcgataaaaaagtaatttctatctgaaaactttacgactttactttatcaaaataaacactaagcatcctatatttaatacacaaaccgatgtaaaatacataagtgtatcatcatctcattttttatactttttaattaaaaaaaatcttactttcgcaaacacttattaaccttaactttaaaactttttttttatgaatctacagttactcaacactaagagaattattaatcttacgaaaaagacttttttacctgctatcgctttaattatagtttttacaagctgtgacaatgataaccaaatcgaagacacgaataaacaagttaattcagaaaaccaaattaaaattttagctgaaacttatggcttcactttagaaaactcaaatactaagaaaccaaactataagaaaccaaactataatacatcaaattcacaagaattagaagttatactaaaatcacttaaaactaattttgagagttctaaaataataagctcaaatgacatttctaaggaagacaatttagggtcgcagaaatggagaaaaatactatatgataatttaaaaaacaatcagacaagtaaaaacacctcgactaacgacgatcctccatacaaatattcttctacactatactttgacaatagttttcccgcagcaaatattgctgtaagaatcgattacaatttagacgctaatggaaatgttaccgaatcttccgtaacaacctacaaatatggctatgatatggcaggggattactctcagacagcagtaaacataacctcctatggtaatatgatagtttttgaagcgattggtcaattttcaacttcagtcggcttaggttcttttagccttaatagtacaaattctgtatcatatacaggatatattaaaacaaatagaggaggaagccctacattgcaaatttggcaagaaccatacatgggaccacgtgggaatgacgatcaaaacacacctagaaaccaataattttcttttatgaataagaatcagaaccgaataagattattcctgagaataactggcacattctcaataataatcttttttgtttcaaaagcacttgaaatagacaacaaattcactgactacctattgattttaagcgtactatgcttttcaataattatactatgcgccttaataaagtatttaaaaaataattactttgttaaataaatcagatcacaataccccctatatctttctaaatttacgtctcaaattaatctcaatgacggagaatctagaggtagtaaagaattcttaaatactctcaaaaatgcaaaagtctctacattatgagatttttgcatttttttagtttatctcttcacaaaaataaagacccttaaagcataattttcttttcactccacatccaaataaggatctaaaatctccgctaatttattcagccaataaaaattatcatcgatataaggtaattcagattccatggtttcgcaccctcgcatggaagatagcgacagcgcataatttacctgtcgtaacattctcgccatatctttaggttcgataaaatccttaaaaaaatctcttaatctagtttcaacatcattcgaaacaccttctgtagccataatcttatttttttcaaatataataattttgacacaaatttgtgtcaaaacaaaaaataaatcttatgacttttgaaatatggatatttcagaagaaacttttataataaatcttggcattcacataaagcaactacgtgaaaaaaaaggtatctcacaggaagatttagctaacgattgtgatattccaagaaatcaaataggccgaatagaaagagcagaaataaatacaggtataagaactcttgtaaaaatcgccaatgctttagatattgaacctaaagaattgtttgattttcctttaaaataaagatcattcggctaaagccttttccttcaaatcataaaaaaacctccagctaaagcaggaggctatttgtatcatttattatttttcacgtacagcttgtcctttcgaggaacgagactcgagcgatagcgaacaggcgaagcaaatcgcacttgtaactcaacaaagattggcgacaattggagcggagtttcttgtgtgattcctcctccgtcggaatgacaagattgcgtagaaactttgcgcaaaaaaacccataactcacaactcacaactcataactcacaactcataactcataactcataactcaaaacccttagcctatccagattttacttttcaccaaagtcatcgtttgtcttaaatgctgattgcaggcaatgagaaagatcaaaaccaaaagactatagcccataatggtataaatctccatatcggccagtaaagtggcttgtttggtaacggttccgaagatctttttcatggctaaaacattggcattgtctgccgaatatcctttggcgataaaactctgtgttgttgcggcaatcgtttgctgtgcttcggggttatcgcctgttacaaactgactgagttttaaaaagtgttttttgtttaaaaatacggtcgcattctgcatcacgcaaaaaccaatggtacttccccaaaaacgtcccgagacccccacaattccagaagaagccgccatttttgaaggaaccgaagaagtcgtaaacaatattaacggaacaaataaaaatcccactccaatgccttgcaaaacatacggaatgataatatccgacaacgccacatcgggcacaaaaagaaacgtaaaccaaaaatgaaacaacgcaataagcgaaaagccaatgataaaaatgattttggtcgaaacggacctcatcagaaaaaaagccgccagaacaagtccgattacatttcctagtccgttaatgtattgcacgcccgctacacgcgacggatcccaattccaaattgaatacatcgccgagtgacaaaggctcagcgttgccctgctgatgtagaaaaggaagaacaataaaaaaccaatgcgcagattagcatatttaaaaacttcaaaattaaaagtaggtctttttaccaaaagctccttaaagataaacaaccctcccgaaatcagtgcaacgataagcgtaagcaccatttgagaagaatcgaaccaatattttttctcggcatagacaaaaaagtaagcaccgcaaagaattgcagttaaaaccaaaaaataactcatccagtcgatttgatacaacgggattttctttgtgattcggtgcccacgaaaagtaactaagattaaaaaaacgttcaaaacctgtaatccgccggagacatacagcatatatttccagtcgtaatgatccagaaaccaaaccgcaatattcattataaaaggcgtcgacaacaacaacgctccataataaaacgaaaaaccaatgatgatggcacttttagaattgaactgctcgatcaacaattgtcgaatcgtaattaccggaagcgccatcaaaattccttcggcaattctcataattaaaaaaagcgaaaaattggtaatataggccgaggaaataatcgtaattccaatcaaggaatataccgccattaggtaatttttggcagggaaaaaactagaaaacctcgcttcgattaaaatggtcgcgagcagcgtcccgtaagtaacacacatagcaaactgcaggtcttcgggttcaatatcgagaaaacttgccgcataggtcacatttgacgtataaacccccaataaaatcatagaatgcagaagacagacaaacaaaatgataatgatcgcccactttggaacccaggatttaaaaatacttttatcttccattctagtgtgctgcaatcacagtaatattcattcccgctcttaaaaaatcggtttgtttgtcgttatcctttaactgaattcgaaccggaattctttgttcgattttcacgaagtttccggttgcattatccggaggaagtaatgaaaatcttgctccgctcgcaggcgataatgacgcaattgttcctataaatgttttatcacttaccgcatcggctttgatttcgacatgctgcccaacggttagatattgcaattgcgtttctttaaaattggccgtaatccatttttccttacttactatcgaaagcagagactgaccttctttcaccaattgtccgggctgtaaagttcttttcccaatccatccatcgtaaggcgctgtaattatggtatacgaaagaaataaagccgcattatctgccgtggcttgtctcgaagcgatattggtttgtgtggttggcacatttgcttcagccaccgaagtacttaaagccgaagtatggattctgtttttcatctcctgaaaatgcgcttgtgccgactcgtaatctgccttcactttttctaattgctgagaagtcgccgcttcttcacttaccaaagctctgtatctttcgtactctagtttggttttccaaagattcgattttgcagcatctaattgcgcctcattaatagccgtcgcacttgctgtgtttaccgcatttttctcggcaaccaggctattttgtcttgcgttctgaacatcggcaagagccacattcaatttcgattgatattctctgttatcaataacaaccaaagtatctcccttgtgcacaaactgattttcattaaaacgaacttcctgcacataacccgtaattctcgacataattggcgttacatattgctcgacctgagcatcattagtctcctcatgattcctgttgaaaacataaaaccaaattcccaaaataacaccgctaattacaagcacacacgcaataattgttattataatatgaaacgttctgtttcttctagtttcatttttaatcttaaccataaaatctatttcttttaacttaattctccaccggattaaaatccggcgctaccatataaatcgtttcttcggaactaaaaccccaaactctatactctatattctacactctatactctatactcttcacatctaacacctaactctgcggaagcattcccgccgtacgcaagagttcgtaatgctttaaaatcgcatccaatcgtgtggcaactttattatattttgcctgaagcaaagcattgtcggcatcaaccatttcggtaattaaaaccagttgattcatatatttcaattttacaatacggtaattttcatcggccaaatccaaagctttatctactacaacaaacttttcaagaatttcctgatactgtgtatgctctctaaaaagtttgtcctgaatttcgtctttcagaatctcagactgcatttcctgccatttgattttggtgtttgcctggtctattttggtcttgttcttatacagagacgaaagatcgaaagcagcctcaacccctacttgccccagcgtgtacaaatatggattgggtggaaagaatttgtagttcggataataaaaaccatagttcccaaaaaaatgaaccgttggcagataattccctttaaccagtttcagctctgttttgctaatattcagctcctgactagcaattcgcatctcctcattactcaaagccttattcagataaaaatcatacggatctaaaccgttcatttcatccaaactggccgccgtatcgatcgctatttcttcgttttccggaagttgaattagagttttcagatcgtgaagcgcaatttttatgtttttggaatttgtaagcgcatttaattcacgatccgaaagctgtaattcggccctgataacttcatttttagtcactgccccatgttttcgaagcgactgtacttctttcaatcggcttttctcttctttgatgttttcttcaaaaatcttttgcagctccatcatcttataaattgccagatagtttgccaccacttcgagttcgacatcattttcgaccttttctgtttttattttagcaatttcactctcctgattggcaattttgatggcgttatttattttatttccggcgtagattggcattttaaaagtcgaattcacctcatagagttccggaatcgcctttgtaacttcttttccgtttaaaaacccgtttcctttgaattcggtaatattagtgattctggaatacataccgcttagtcgcacatccggcaatcggagttcttttctttctttgatattttgctctgagagcgtaacctcaagttgagatctgaggatttttttgttgttttctttggccagtttcaaagcttctttcagtgaaaccgaatgaacttcctgcgcttttatgccgttaaatgctaatacaagtaaaaataagagcaggattttaggaaaacaatcgttcgtagaatttgttgttttaaggaacatgaatacataaataatttaagctgcaaagttccttcatttttctcattgactgataattctaaaaagtcaaaaacatattcatttcggacaaatgttaaaatcggatttttcgaaaacgttatattaaaacactggaaaacaatttattacaaaatagatttggattgtgatttttcacgcagcttttaaagaatttaagtcgatttttatttttccctctcgcagattccgcagattgagcagattattaaagagttaaaaatttacttttgctccaaaatctcttcaccatttaagtaatcggaaggtctttgtcctaaaatcttgaaaaatgtgttactgaacgttggaacactattatatccaacttcttcagctacctctttcaccgaaagctttctttctaataacaactcgattgcctttaaaattcttcgaatagtataatattgaatgaaggacatccccagatctttctgaaacaagcgatacaaagagcgttcgctatatccgaattcatgtgctacatcagcaaacagaatagtctctcccagattattctcgatatgacgtaaaatctttccaagtcgtttgtcttttggctgcggtaatcccaaaggcaaattggtagtacatatttgaggcagaatcgcttttatagctttggcgatggtaaagtttggagttcctttctcaagatcgccattccatcgattcgtaaaaagcatcatttgaagcagtaaattattgaccggataaattccctcgtttttgtaaaactcgttttcgtctttttcaaccggaaaatagaggtttcgcatcgtaacattttccgacttcggttcaatgctgtgttccactccactcggaatccagataaaatgacgtgccggtaaaaaataggttttggtttcggtcgttacaaaaacaacatctccttcagcatacaataactgtgctttatcgtgtttatgtgtaggtacaaacaactcccccatcaaatcgtggtgacagtaaatgctttttttatcggcatctacttttttgatgtaatacttatctaatttctgaccggaatattccattggagtttaatgcaatgcttttttacacattaaatataagaaaattaaattccaattgtttgaaattccaaagttggaccattaagacttaaccgcaaagtccacaaaaagtaaaacgcaaagttcgcaaagcttaatagttaaatttatccacatattacttaggatttaaatcaaaggagaatctttataaactgtggctaaaaaaaactttgcgaacctttcgtaaatcttagcgcactttgcggttaaatacaaaaaaaaagcctttccattaagaaaggcttcttccaatattgcggtctggacgggactcgaacccgtctcgtccctagacgagatgacagacatatattctaactggccttacctttcttattgctgatcttgaattaaagcttcaagcgattttctatttaactttttcaaccgcaactcttcaatcaaagcctctcttttagtattaaacaccttcgagtaaaccaactcccatggacctttatttgaagtatatctgcttttattttcattatgatacaatagtctttgaggaatattttcactgaagcccttgtagtaaacatcaaaagttttagaataaataatataaacgtaaaacataaatgaaaatcttatttaaaaaaaaaagcctttccattaagaaaggcatttttaaatttaagcggtctggacgggactcgaacccgtctcgtccctagacgagatgacagacatatattctaactggccttaccttcttattgctgatcttgaattaaagcttcaagcgattttctatttaactttttcaaccgcaactcttcaatcaaagctcttggtatcaaaattccattttagatttgtcaaatcatcatcaaactcattttctaaactgtaatcatttttaaaaatttcgtctttattccaaattttctcaagttctttaaaatttaaaatagaaaaaaaagtattaattacatgcggattatatgctctgtgtgcaatcattcctccgtcccgcacaccacatactgtataatcttcagacttcattttattgataatgtcaaagacaatccctgaatcctgaaacaaaacatcttcatctgccatgatcagccattcaatgtttttatttttaagcattttcatcatataaaaaatgctttttagaccatgcattccatttctaccatctatcacatatttctgaacatctttcggaaaaaacggggagcttttatcatataaatcaaaatttataaccgtagaaagtatggctatattagacctgttatctaccatattttaaagtcaaatctattcataaatttcaccaattctttatccttaatattaggaatcaaaattcgatttatttttttacctgatttatttttataattggaataatcattatttgctatcagcattcctaagcaatctgactcttctatcactttaagtgtgctttcgttatatgatccatgaggtaatgctaaatactttactgattttgcaaccaatttatctagtttttcaattgaaaaacttaactcttttttctgttcctcataacttagattcccaaagggataatgattatgagtatgtataccgatatctattaatggatgctcagacaaacgtttaagctcctcatcgcttaatgatctgaaatcttcattatcgtgaaaaggaattttatttaaactttcaaaatctaaaaaccaaatttccttttcttcatttgatagtttgcccataagtttgtttaaatcgctaaacgaatgtgtttgtttggatactttttcttttacatcaggaagatagaaaaacggatcacagaagttatagtcaaatacaaaacgatcccaccaaaactcttttttagtatttatatttaatgtcgttacaaaaattgtagccggtatttcatacttctccaataggggtaaagcatttgctaaattatctgcgtatccatcatcgaatgtaatgactattcctgtcttctttaatgagttccaatcatcagataatctaagaatctgataattttccttaaaataatgaagttgcttttcaaaactagcaagatcaacagttaagtattgcaactcacttctaacttcattactggttctgtgatacatggcaacaaaaaccggcttaccatacagcaatcggtttttgagtttattcaacttgtaatatatacttttaaatttagctttcattaattagataaatctctaaattgtttttgatggttcaatagccaaatatcttctttttgaagacattccagaaacagtacattactatttcctttcccaaaatcatcttctacattttgaactttatgtgaatcaataacagcaagtgattccattataccttcttcagaataatttgtattgattatatcagcatgaaccgctctgttttgctgacgggttccgatattaataattggaattccatagtacggagcttctctgatccctgcgctgctattaccaataatgaattggctattttttaatagggttaaaaaatactcgaaacgcaaagacggaaaaattctgaacctctgattttcttttaatctctcataagcctcaataataaattgactacccagatcgttgtttggaaaaataacaatataattatggttgtcctgcaataaagaggatacaaagttttcggcatatttttgcatttctttgatttctgtagttacgggatgaaacattacgattgcataattttcaaaatcaatcttataatattcttttaccgttattaaatccggcaactgatcagaaaacataatatcaagatcaggagaaccaattgtaaaaacagattctttaatctctcccatttgtatcaacctttttgccgcctgtttgtttgaaacgaaatgaatatgacttagtttactaacactatggcggattaattcatctacagttcctgaaacttcacctccttcaatgtgcgctaccagaatattgtttaatgaaccaacaattccgcccgctaaggtttcgactctgtctccatgaacaactatcatatccggactaatggttttgcagtaacctgataatccttcaatagtttttgcaagagttaagtccattgttgtttcatgggtatgattttcgaaagtaaaaacattcttaaaattgcagcgttctatttcgatcagcgtataaccgtattgttcctgcaaatgcattccggtgacaaaaacaaaaacctcaaattcagattgttgttctaaaattgaaattagtgattttatctttccaaaatcagcgcgggtgcctgtaagaaataggatttttttcatttagtggtgatcagtttattcgactgggaaaatatttatccctataatttaagaaatacttttctatattaagtgtcataaaaattccgcataaaacacttatgatacaggtaagaaaaaatatagaaatctgattaaagaatttatttaaaacaaaattatttactaaggcaaagaaaaaatttacgaaaccatgtataatataaatactataggaggaaaatccaatcttgctaataatatttactattctgtttgaaaataggctatcaagttttttatttacttctgtacttacaagaaaaaacacaagtataatactaaatgcgatataaagaagtgaatacccaaatgttcttacgaaaaatgattcttcaaagtctataaacggtgtaaacataagagctaaaaatgagattatcattaatcgtattctatttgactcaaaaaaatgcgttagcttctcatttttaaaataatataggtatgaaacaaaaactccggcaaatagtgaatccattcttaaatgagacattgtaaaatttttatctccattttcaggaaaataaacattactgacaattcttaaacacaatgataaaagtatcattagaaagatcaaaacctcaaacttatctgttttacttgcttgatttggttttaaactaatccaagcatgtttaataacgaaccataatagtacggcaaaaccaaaataaaaatgttcttcgactgctaatgaccaactagctgtataagcataaccccacgcacaaacatagttctgaatgaaaaacatatctgataagaaacctttccattcaaattgatgtttaataatcttaggggttaagtataaaaaataggttaaatagtatatgggatagattttaaatcctcttcgtactaaaaacaaacctggttttatatttccaaattttagatactctttgaataagagtcctgaaacaagaaatccgcttaaaacaaaaaataagtcaacgcctatccagcccatttttgtagtccagtctgttatatactgatggcgcattaagaccaaaataattgcgatccctcttaaaaaatcaagttctcttaatctaatattttgcttcaaaattaaaaattggggttaaaaagtaaatggtattgtaattaaaaactagtttatatcctcccaatttaattgctcatcattttcaatatctcttgaggccgtttttcctatcagatcattaaaatgttctgccagtattttacccgttcctggtctttttacccaaatattttctttagataatttgtcgcctttttttattggtgctattgcacaaacagtagcaaaagcaaaatctatcgtcacttgttcttcttcagcaggtttttttgtgccaccacgcatcaatgcaatttcggcacttgaaataattagttcctgacacgctttttcatccatactacaaacaatatccggacctgttcgttgcatatgatctgtgaaatgtctttccagaatactagcacctagggctacagctcctaaacaggcattattgtttaaggtatgatcacttaaaccaaataccttatccggaaatgcttcatgcaattctgtcatggcaccaaaacgtactaaatgaatgggtgttggatatagatttgtggtatgcaaaagtgcaacaggaatagtatgtttatcaaaaatagccactgcttttgtaatactttcaattgtattcattcctgtactcaaaattaccggttttccaaaagaagctatatgctctaataacggataattattgcattctccagaaccaattttataagcagggatatcaaacttttttaatctttctgctgctgcccgtgaaaatggtgttgaaataaaaatcatgcctttgctttcaacataatttttgagttctaattcatcagcttcattcaaagagcaacgttccataatttcataaatagaaacatctgcattacccggaattacttttttagcggctccgctcatttcatcctcaacaatatgggtttgatgttttactacctcggcacctgctcgttttgctgcatcgaccatttcttttgcaacttgcaaagaaccttcgtgattaattccaatttcggcaataactaaaggtggaaaatcttgtccaattcttcgtcctgcaatttctagatagggtttcataaattagtttgttaattagggctttatatatttgtggaataaaaactcggcgaaatcaaaatcttcctgcgtatcaatatcaacattggcaaaaatatgatctattttgaaaggaaaagcatcttccgaaataattatatcttcaagaattaatgatgcttttgtgatatataacaacccgttttcaaaataaatcggttccatatcctgacttctctgaccaattttgtaattgtacggaacaaacttttgatctgttatttttccgaactttttatagtttcttgaaacagtaaataaactatcgctgtcttccttttgataaatttcaaatgtttcttttagcaaactttccggacgaacagggtttgtaggctgaagcagtaccacattctctacttcatgatcaatattttgtaaaacatgttttaatgccgaagctgtcgcctcatgatctcccgaaatatctgcgggtctgtctattacctttgctccgtattctaaagctattttttttacattttcatcgtcagtcgaaacataaatttcttcaatgatagcgctatttgccttagcatacataatactgtgtgctaacaaagggattcctccaagcagttttatatttttttgaggcaatcttttagatcctccacgtgccggaataatagcgatcgttttcatttttaatgtttaaaagaattgcaacaatattattttatggtttccaatacaactttgtatcttcctgctcctgataaattttatattctcgtatggatagtctattactatttttgattattttaggaaatgccaaaattaaatctattgttgccaaaaacaatgctttcaaagctttaaaatctcccttgaaaactcttaatttaagctgcatccaaacagaatacgttattttttttggaatgaccttaagaggataaaacaaaaaatacaaataccagccggaacgcaatgaccgtcgcaggcgtaaactataatcggcattattttttctggattttaaatctactctatgatttactaacacttccggtaaataataaatcttccattgttttttaaataactgaaatgacgcaaaatcttcttctccataaaaaacaaaccattccggataatcaggaacatctcgccaggcagacattctccagacattagctccaccggcgaaacttttcatttgatgtaaaacgtcgtcactggtcgttatttccggttcttgtaaactccaatagattctaaaactaaagagtgccacattaggattctcttcaaaagctttttctataatttctaaaggatttgtggtaataaaatgtaaatcatcatcaatcgaaatggcaaaatcagtcgtaaccaaatccatcattctgttccgactatagatcagtccttcgcttttattgttccgaattaattgaatttccggataattcttttcaatcaatgaatacgttccatctgttgaaccgtcgtcacaaataatacaagatacatcttctctatccagtaaatgctgaattttacgcaatgtaaaattcagatcctcttttctgtttttggtggtaatgagaatagaaaacttcttctgaatgtgcatttacttaataatttctaatcattggttgtggtaactttttatatcgcaagaatatctttttcatccatttgactgaaataaattttacaaatattctgttttttacaaaatacaaaactggatttaattttatatttttattaaatccgcattgaattatgtccgtactagaagctttcggaacagacatccagtcctctaaagtatttcctaaatgacaggcgtaattatcctgagttgttactctccagtaatttttcttaagaggtgatttatctaaatacccctcactggttcctcccatcttaaagcctatataacttacgatttcatcaaaaatatcctttttataacttgcgacaaaatgtcccgaaccaatcaacacttttaagtctggactaatctccaaacctaaattatattctaaataatcctgattataatttctatcccaaccaagactgtcataaaatctaattaaagcttctttgttttttacgggaataaattttaattttttactgaataaattatcccagataacatttccacaattttgttcatacattttaaactgcggtacaatgcctaccactcccgcattaggaatatttgtaaaaacttttactgtttcagattgccagttcggtaaaaacaatacatctgaatctgaaattgtaaccaattctatatgattccccgccaaacctttcaatatcgcattaagttttcctatgttatcagtatgaattaattcgtgtattttattttgctttaaaagaaaatctaaatattcttttataattgtatcacttccattattaacaatagtgataaatgtttttttgtgaacggtagtcaataaagattccagacaaagttttaaaattgcaaaactatctttaaaataaccttcctgattaggtatgtaaacagggattatgatctgatgaataaattcagaatctttttgtggttcatctttaaatggattaaatcctacccgcatcttatttcttaaatataattttcagtttatgaaaaatccttttttttagttttgctaattttagagaaacggtatcatttttaatctgttgcttaaaaaataccttattctccctaatgactttaggaaattctcttttgatcccaaaatagataccttgcttttttttatttaagaaagtagaatctgaatcgccatactttgtctgatacagtgattctattattttccagctgttaacaagactatacgctttttcggtggtttgcaacaaacttaaattctcaccggacacattatttcgatataaaacataagtattaccggcaaagattattttactgcaattcgataatactctaaaaaaaaactccccatcatcgttcattgttaaactttcattccagtcacctgaaaatgttattagttttttattcattaaaaaactgtgtgaaggaaaaaagcctccatgtagacctatcaaatcaaaatattcttttgcagaatcaaaatttctataatcaggattattttcattcaatttaagggtttcgccaatatgatcaaatcttccccatttgcatgttgaaataacaaattcatcttcattcgacactagcagaatttgttcttcgagtttatttgcagccagtatatcatctgaatccaaaaactggatataatcgccttttgcaacttttagtccaatatttctggaaacacttgctccttttttatcttcttttgattttaatatcagtttgaatctattatccttttccttgtaaagctttatcgtttcttctgttttatcggacgaattatcatcaactataatacactcccaattagaataagtttgtccaattaggctgtcgagtgtttcaccaatcaaatgtgcccgattgtaagcggggataataatagaaactaaaggcttattcatctatggctactgtactgtataaattgtttattgaatctcttattctttcgtagttataatcttcaatagctttgagatggttacttttggcaaattgaacattattatctttattacggataagacctaatattttttcagctatttcatctgagttctcaggatcattgattatttctccaaaatatttttttcctataagttcttttgtggcattacccggattggattgcaaaggaattaccccaagtaataaagcttctaataatgaatttggcatgccgtctgaaaaattatttccaatataaagaaatgcttttccaaaataattatgaagctccgactgatttattccttctattattttaatttttccctccagttttgaatctgatttaataaattctctgactttttctcctgctgaaaaaacagcgatatgaaaatcatctaacagatcaattattttttttatagcttttaaggtatagagggctcttcctgtttcattatgattgccttttatcaggattaattttctggattctatatcccgaaaacttgtttgaatatctgttatatggtatccgccgcctccgggaagagctcccaaaaaaactcccttaaaattatactttcttgctagatcataatctctttcacaatctgttattaaaaaatcaactctgtttaaaacagattcaagtttctgaatgtcatttttaagaacctgatgtctaaaaatatcgcttccccaacaagaataaatccatttaatcccctgatttttattcattgctttcagtatgggataagagcagtaatgcaattcaaaactatgaactatatcgggcttaatttcctgtataattttctcgaaaccttcattggcagaaacttctaaataaggaattattttatcatacgccgaaggcatctttttcctcaaaaaatattctccttttatgtagggatattttctttttttccaatctacaaattgacgaacataatctaaattctctagcggtccccgatctaaaacatcaaaccaataaagttcatgacctttatcttttaagttttcaatccaacggagcacgtggatagacggcatcgatacaaaaagtattttcacttgatctatagttttaacttactcattaaatctttttctgtctaaaacttaaacagcatcttcttaaacactttataaaggcattcatctgcattgctgaaagataaaaaagaagtaaataacgccattcggtccatctcagtttcctgttctttttgattgaaatttcatattctaatatcaaatccaactgttgcggcttactaaaaaaaaccattttttcaacaatacattgtttgtaaaaattttcgctcgcaagatcttttaatttttgattattctgttttccggatatggacgaactggaatatctgattaataaattactctcatttatagagtaaataggtttatcatcagaaaaaaataaccaagctgcatcatcactatgccaggctagaggaaaatcaaaaaagccatattcctgaaaagccccttttgaaaatgtatattcagacaaagaactccttgtcaatcctttaaatcttctaaaataggaatcggatgctttttcccataccggatttgtaaatgaatgacttattcttccgttcaaattcatgtttaatgattttgaagcaaatcttaccagatttgattttgtatgaaaaacattgtaatgctcataccaggacgctacaacatttttctccaaaatatcgtcatcacccaaaatcattatccagtcttcctctttaacaagggcaatacaacgttcccaatgcttcgccagtgatattcctcctaaattttcctcaaatatctggtaaacgaaatcaattttgtccttgtactcctccaaaagtaaagagggatcttccggactggcatcgtttcctataaatactctgaatcttttatctgtttgctccgatagtgattttaaggtttcttcaaaaaaaatcaatttataatatggaattacaatcgctagcatttatcccttatttatttttccgaaaattgtaaacccaaaaaaggttttacaaaacaaatcaagtacaaatttttcacttttaagttttgcagaaaacccttctctttctttttgtaagttgtagtttaatgccccaaaagatcccagatgttctacaaaaaaatcggcatgttttatacttaaatagttgaatagtctctcttttatagtaccatccagttttttttgcctggacactaattttattctgtaatagaatcctataatatttaaacatgatacatttcctccattctttagaagtgatatccaaaactcccaatcctcaagaccatcgagcatgttattatcatatcctccaatcaattcccaatctttctttcggtacattgccgagcaaaaaatcatattatctagtgccaactctttgagtgaaaatggtgtcagattccagtttcctgtttcatcaccaaatttttctgctttacaataaacaagttttaatgactcatcattttcaaatgctcttatagctagtttgatgtagtctttagcaattttatcatctccgtcaagtggcagaataaattggcccacactgtttgttataccaagatttctggcactgctaacccctgcattttcctgataatagtatttaaatcttacatcttgttcgatccattttcttactatttgttctgcattatcagagcttccgtcatttactacaatacattcccagttttcaaatgtctggtctgaaacagattgtaaagcttcatccaaatactgagcctgattataacatggaaccactatagaaactattggatctttcattttttactatagaaagttattgattttacaaacagttttgtttcgtgccataattttaatttaaatggtgacttttttctaatttttaaatattgcaaataaacttttggagagtatttttcttttttaaaaaaatagtctttatacaaattgttctgaatctctaacagatacttttcaaaacctgtcttttcaaaaaaagaagtttgatttgccaaaagcaatttgttttttaaatcttcgaatcgatttatttcgctaaaagaaacaaattctcttcgtgatattatcttctttagaaaatcttgtgtctcatcatctctttcaaaattgagattcgtcagtaaattaactttaatctccagtgcagtatttgcttgttgttcatttcttttatgagaaacttgcgaattgtgaacacgataattaagtaaaacttccggcaaattgtacagctttcccacggctaacaatcttgtccagagatcataatcttcggctggctctttttgggtatcgtaaattaaagcaaatctatccaaataacttttcctcatcattacagttggatgtcctatacaacaatccttaagcattgccaattttatatcatcatgatcttcaggaacaacaacgattttatctttgccaattatcttaaagtatgtgccaataagtactgtttcaggatttttatctaaaaaagcaacttgtttaacaaaacgttccggcagacttatatcatcaccgtccatacgggcaatatattctcctttagcaatgctcaatccgaaattcagactattcgtaagacctgaattttgaggttttacgattaattgtattctgggatcattatagttttttataattgatactgttgaatctagagaagcatcatcaattattataaattcaaaatctgaaaaagtctgattcaaaatactatctattgcttcctctatataaagttcgcaattatagacaggcattagaactgatatcttggggcttgaagacattatttcacttctttttcgaataattctatatctgatgcaaccatttgttttactatatcattcaaatcaaattttggttcccatcctaaaactgttcttgcctttgtagaatctccgatcaacaaatcaacctctgttggtctataataagtaggatcaacttttactacttctttgccaatctcaatttgatattttggattcgaacaagatttaacttttccaacttcattttcattttctcccacaaattccagttcaataccacattctaaaaatgccattcgaacaaattctcttaccagagtagttttaccggttgaaataacaaaatcatctggtttatcttgctgtaaaattaaccacatcgcttctatgtaatctttcgcgtggccccaatctcgttgcgagtttaagttcccaatatataatgcatcctgcaaacctaaaactattttagctgtagccatagtaatttttcgggtaacaaatgtttctcctcgcagaggcgattcatgattaaataaaattccattgcaggcaaacatattatacgcctctcgataatttacagttatccaataggcataaatttttgccacaccataaggcgaacgaggataaaaaggtgttttttcggtttgtggtacttcttgcactaaaccatacagctctgaagttgaagcctgatagaccttggttttttctgccagacctaaaattcttaccgcttctagtaatctcatggctcctaaaccatcaacatttgcgacatattcaggagtatcaaaactaacttttacatgagacatagcccctaaattatagatctcgtcaggttgaacttcctgaattattcttattagattggtagcatcagataaatccccataatgaagaatgaatcgaacgttttcctcatgaaggtctctaaacaaatgatcaattcgttgcgtattaaatgatgaagctcttctttttacaccatgaacttcgtaacctttctctaataaaaattcggctaaataagctccatcctgaccagtaactccggttattaatgcttttttcattttctatattttaacccaatttgtcgggattatgtcattcgtatttatggaatcgtcattgaaccatcgttttggagcaattacaattttattaggatttttattcagccatgcaccccaccagctaaaactactatttgctataatattgtgcttgcaagatgccattaattttaaatcttcaaaatttgttgaagcatcattaaaatcaataaatactgtttcttgtttggtcgaaaaatttgcttttacccaatccatatcatccgaaaagacaaaataaacaggattatataccttattttcaaccatctccaaagctttgttataatattcttctttacttgtattatgcaatggattatttatatagtctcctcttcgaatatgtatcgaaacagaatttacagactcaatttttgcaattgcagctttagtctctttttttagcagtgtccgcacttcaaaatcttcccgaatttctttttcatactttataaaatatttctctgattggaaataaccttccagaaatataatatctccttttaaatgaatcagatcagaattatatacaaaatcgacttctttataagcttgttaatatgtgctataaatttatttttaaaagcattgaaatgaagtttctcttagttatcttgagttatcaacatacttatattttgttaaaggattaatttctaagagtttttgtattttaattaacaacggttgacaacctgaaatagattcattttgtagataagttcatatgttgatatttgttgaaaatggcatttttgatattgataacttttccaaaaattcctcaaactttattaggttatttcatttgcgttttggattaggttttttttcgacacaaccaaaaaaaacttcttattttctattctaacttattaacaaataatgttaacttaaagttaattgaatatcaacgaattacgaattgctattaacacttcaaaattttaacaaatattatgattattctttattggtaatgagatagttacagagttgttaataatgttaataactgttaagattttgatagtatgatagttacaaaatttgtttttttgactgattttacgaatgtgtatcaattataattgagatgatttatggaatgtttataagtgagcagaaaaaagaaattcgtgaaaattgatgtaattcgtggcaaacatttattaattgagtaaatttgtaccacacaacttaatagtatagaaaaaatgaaaatttcgataggaaatgaccacgcaggaccggattacaaaaaagcaattgttgcaatgctgcagtcaaaaggatatgaagtaaccaattatgggactgatacagaggcttctgtagattatcctgattttggccacccggttgcaagtgatgtatctgaaggtaaagctgattttggaattgtaatctgcggcagcggaaacggaattgcaatgacggctaacaaacatccaaaagtgagagctggtttatgctggactaaagaaattgcttatttaacacgtttacacaacgatgctaatattgtaagtattccggctcgttttacctctattcctcaggcagttgagattgttgaaacctttttaacaactgaatttgaaggcggaagacatcaaaacagagtgaataaaattgcttgtcagtaaaaagccaaaaaaattcggtgcttcgcaccaatactaaatatataagccgggtggatttttaaaatccatccggctttttgttgattacatagttatatatttaatttactgactgaatttacgttaattaggtaaacttactaactgaatttacattaatttagtcaattaactgactgaattaatgttttttttatatttgtatcctaattataagtcaattagaatgaaaacgtatttaaaaagagcgcttgtgaacgagtttaagaaaaaggtactacctaataaggttttaattttgcttggagcccgtcgtgttggcaagacagagttgatcaaaagttatttggaagaaatttcatctgatacttatttgcagcttaatggagaagatattaatgatgtagctttattaaaagaacgttctgttaataattataaaagattattgtcgggtattgatttactggttattgatgaagcacaaaatgttccggaaattggaatgattcttaaattgattgtggatacaattgaaggaattaaaattataactacaggatcttcaatgtttgatttaagtaataagttaggcgaacctctggtaggaagaaaaaatacaatttacttatttccattagcgcaaatagaattctctgaaagggaaaactataaacaaattcgtgaaaatttagaagaaagattactttttggtggttatccagaattgattcaatatgataactgggaggataaaaaggactatctttttgaaattatcaactcatatttattgaaagatattttagtttttgaagggattaaacatgctgataaaatttatgatttacttcgtttggttgcttatcaggttggtaaagaagtttctatacaagaattggctaatcagttacagttgtcaaaaaatacggttgcgaattatttagatttactttctaaagtgtttgttctttttaaagtagaaggatttagcagaaatttacgcaaagaaattgtaaagtcaagtcgttggtatttttatgataatggtattcgaaatgctgttattaacaattttaatactctagctctaagaaatgatgttggtggtttatgggagaactatttagcttatgaacgaattaaaaaacagcaatatcttaaaattaaaaccaaaaattatttctggagaacttatgaccagcaagaattagattggttagaagaaaaaggagaaaagctggagggatttgaatttaaatggagtgaaagtaaaaaagtaaaaattccaacagcttttgcaaaagcgtatcctgatgctgcttttgaagtgattaacaagagtaattatttagattttattagttaattttagataaaccaatacaatctgaatgaaaaaaataaacgagaattttataataaaagaagatttactcgttttatgtctaaagaataacatggctaagaacaatccaactgtgccgccaatggcttccagaaaaaacaaggtgttttccgggattcttcgtttgtttttccgggcttgatatttatcatatcccgcgagaataaaaacggtgatatttacaactaaaaaatacgttaataaaacttccattggctaaaaattaaaaacaaagatattattttagcggagtgattgattaatctaatgtcgattttgaaagacagattatctcattttctaatccagaaattatttcattataaagtatgactaatattcaatttattgccaagtctgttccaacagcagcaattaacattcaaaacacggtaaaattactagaggaagattgtacagttccgtttatttcccgttaccgaaaagatacaaccggaaatctggacgaagttcaaattgagcaaattgcgaaacttcaaaaggaatatgaaacgattgtaaaacgcaaagaagcggttttgaaatctattgaagaacaaaaatcgcttacgccggaactgaaacagaaaattgaacaaagttttgatttacaggagatagaagatttttatttgccttttaaaaagaagaaaaaaacaaaagcagatgttgcccgtgaatttggtttagagccattggcaaaaatcattatgtcagagaatgatgttgatgttgattttatttcaacacaatacctgaacgaaaatgtgattaatgaagaagctgccatgcagggtgcacgagatattattgcagaatggataaacgaaaatatttatgttcgtaaacaattgcgaagattgtatcaacgcaaagcagtgatagcaactaaagttgtaaaaaagaagagtgaagaagaaggggctcaaaagttcagtcagtattttgagtgggaagagccattgacaaaagcgccttcacatcgtttattagcaatgcttcgtgctgaaaatgaaggttttgtaaaaatgaaagtggatgtcgatttagatgaagcttatgatattattgatgaaatcatcattaaaaaacaaaacagtaccaccgcacatttacagttagcgattgaagacagttacaaacgactgctaaatcctgctattggaaatgagactttacaggaggcaaaagcaaaagcagatgctaattcaatccaggtttttgcaaacaatttaggacagttattattagcgccgcctttgggtgaaaaacgtattttggctatagatcccggatttagaagcggctgtaaagtggtttgtttggacgaaaaaggagatctgttgtataatgaaacgatttatcctcatgcgcctcaaaatgaggaaaccatggcaatcaagaagatacgttctatggtaaatgcgtatcagattgatgctatttctattggaaatggaactgcatcgcgtgaaacagagtttttcattaaaaaaatagcgttcgacaaaccgttacaggtttttattgtttctgaagcaggagcgtcggtatattcagcatcaaaaattgcgagggaagaatttccaaattatgacgttacggttcgtggatcggtttctattggaagacgactttcagatccgctggccgaattggtaaagattgatccaaaagcaattggagttggacaatatcaacacgatgtggatcagacgaaattaaaagaagaattagacaatacggtaattcgttgcgtaaactcggttggaatcaatatcaacacggcgagtaaacatttattgagttatgtgagtggaataggagagaagctggctgaaaatatcgttcagtatcgttccgaaaatggtccttttgaggacagaaaacaactgaaaaaagtgcctcgtttaggagataaggcttatcagcagggtgcggcttttattagaattacaaatgctaaaaatccgctggataattcggctgtacacccggaagcatatccagttgttgaaaagatggcaaaagatctaaaactttcggtaaatgaattaattgctaataaagagaaaacagcccttattaaggccgaaaattatattactcctcaaattgggttattaactttaaaagatatcataaaagagcttgaaaagcctggattagacccgagaaagtcggctaaggtttttgagtttgatgccaatgtaaaatcgataaaagatttgaaaaccggaatgattttacctggaattgtgaataacataaccaactttggctgttttgttgatattggaattaaagaaagtggcttggttcacatttctcagctaaaagcaggatttgtgagtgatgtaaacgaagtagtaaaactacatcagcatgttgaggttaaggttaccgaagttgatgaagacaggaagagaattcagttgacgatggttttgtaaaaaatccaataaagaaattctaaatttcaagatgggattcaaattaaggaggtatcataaaaattaaaaaagtcccgaaatttcgggacttttttatgcattttaacaattattttttgattacttttttgactgattttccaatttcattcgaaatttcaaacatataaactccagctgctaaatgcgaaatatttacagtggtagataacgttttcaattctttagaaagaatgacttgaccattaagagtgaaaatttttaaataattgttatttgatgaattcaattcaattgtaacaaaatctttggctggatttggatataatttcaaagatgtctgagtttcaaaatcttctgttccaagtgttctaacttctgtacaagtacttgttgaggtacagccatttttggttatttcgacagcataactgccattttttattggcttaaatgtagaatttgtttcatttgaaataacggtataattaccattatcacaaattaaccatttgtaaatagcgccagtttcagcaactgataggattccgttattatttgtaacggtcaaattaagactttttactgttacaatttgcgttgctgttgcggtattgttattggcgtctgttactgtccatgttacaattgtattcccaataggaaaagctgtgggcgcattattcgttaccaatgcaacagtgcaattatcagaggttacaggtgttcccagtaaaacatttgttgcagtacaatttgaagttgtatttacggttacatttgaaggtgcagtaatgattggaagcgttacatcttttaccgttacaatttgcgttgccgttgcgatattgttgcttgcatcttttactgtccaggttacggtagtattcccaaccggaaaaacagttggcgcattattagttactgaagcgaccgtgcaattatcagaggttacaggtgttcccagtaaaacatttgttgcagtacaatttgtattagtattgactgttattgatgctggagcttttattgttggcaaagtgacatcttttatcgttacaatttgtgtagcagttgcagtattattattggagtcttttactgtccatattacagtagtattgccaattgaaaaagcggttggcgcattattagtaaccgaatcaacagcacaattatcggaagttattggatttcctaaaagaactccagttgcagtgcatccggaacttagatttacagagatatttacaggagctacaattgttggactttccaaatctgggattaaatttattttgaaggtttttgttaccgttgttaaatcggcatctgtaacggtgcatgaataatctccagcagtcaactcagtaattttggatgttttttctccgttagaccaaagataggtgtatgggcttcttcctccataaacggctattgtagcagaacctgtagaacctgcacaagtgatgtgagttggcgtaatctccgaggttagtggtgtaggagtgtaagttccttttagtcgaattaaagaagcagaattagtatttcctctgtaagcagtaaaatctccgcctattgttattttaccatcggattgcagatttatagaattaacagaagtagaagaagaactattaaattctgatgctctagtgtctatgcttccatcagcatttaaacgaattaagtgtacagattggtatccttggtagctataaaaactaccgccaactattatttttccgtcttttggcaaggctatagataaaacagaattgccaaatccagatccaattttaaaggagttgtctttgctcccatcagcatttaaacgaattatataattttgattcgccccttgaaagtaactaaatttaccacccacaattattttaccatcagtttgtacaacgatagaatgaacatcgcctattgtataaaggctaccaaatccagttccaatattaaaagaactgtccttactcccatcagcatttaaacgaaccaaatagttttggctaaccccttggtagtttttaaatttaccaccaacaatcagtttaccatcactttgcagagctacagataaaacaggagcatcaaatccagttccaatattgaaggaggtatctacagttccattagtatttaaacgaattagatatctagaaacaaccttttgatattcagttatatcacttcctataattatttttccatcaggttgaactacaattgaattaacactgtctgagtcatcataagcacggatgaaaccacttcctgtgctaaaagagttgtctttgcttccatcagcatttaaacgaatcaagtttttttgaggaataccttgataagcattaaagtaaccacccaccattatttttccatctgtttgaatagctatagatttaatgataccttgagtaccattataagaataaaaaaaaccggagccaatattgaaagatgtgtcaatggagttgtccgtattaaaacgtataagattactttgaagagtttgttgataattagtaaatttaccaccaactattgtttttccgtcggtttgttgcgcaattgcataaacagtactgttaaatccatctcctgtttcaaaagtagtatctctgcttccatcactatttatagataaaatattatttacagtaataccttggtaatcattaaaatatcctcctgtaaatatttttccattttgctgcacaacaataaaattaatacgatctgtttgcccgattccataaccagttcctatatcaaaagaagtatctttggttccgttagaatttagacgaatcaaatgattttgagaaattcctttatagtaaagaaatgcacccccaactattattttaccatcaggttgtaaacctaaagccgttacagacggagcaaatccaaaccctgtcaatatatcaaaagttttgtctcttgaaccatcaggatttaatcgtactattccattttgagtatcattaacatatctcataaaatatccacctgctacaatttttccatcaggttgtaatacaatactatttactgtatcatcaaatcctgaagatacgttaaaggaagcatctttacttccatctgtattcaaacgaattagatggttttgagatactccctgaaattgagtaaattctccaccgacaattatttttccatcattttgtaaaactatagtttttacagtagaattaaaaccagttccaatatcaaatgaagtatctttagttccatcagcattaagacgtatcaaatatttagtagcgattccctgataacctaaaaatcctcctccaactaatattttaccatctttttgttttaccatggcaagtacggtagaaatgccatttggattatccataaaaccagttccgcaattaaatgtagcatctttgcttccgtctgaatttaaacgaattatataattttgtgggaatccttgaaattttgtaaaaacacctcccagaatcatttttccatcatcttgcagaataattgaagatatataattagaatacatcgagttactaaaaccagcaccaatattaaaacttgtatcttttgtaccgtctggattcaaacgaattatattattagaagaattgtctcctctataggagctaaaggcaccccctattaatatttttccgtctggttgtgtagctgtacataaaacactgccatttgagaatccctgatatgatccatattcatgttcaacatcaattgaattttgggcatcaattgttaagaattgtaaaaagaaaagtaataagagtaaaggttttttcatataaaatagtttttccaaatataaggatatttacatacaacttttcttatatagaaaaggctatcacaaaaaaatcccaagctacactgtaacttgggattttaaaattttataaagcagtaaattattttacttcttcctcttcttttttagcagcaggagcagattgatcgtccttagcagcatttttgaattctttaattccgcttcctaaacctttcattaattccggaatttttttacctccaaaaagtaatatcacgatacctactattacaaggatttctgtaagacctaatcttcccatgattgttatatttaatgccgaagcaaattgttttctaaattttaagcaaaggtatatagaaatatacgaacaagaagtctttttagattaaaatatttgtttcaggcagcgttaaatattttataaaatagtaaaataagtgtattcgttcatttttgtcccgcagcaactagacgattaattgttatatttgctcgtaataaataaccataaatgaccaggaaaaagttcaatttcaggaaaagtttattcattaagaaccgattggtaattttgaatgaggatacttttgaagaaattttttcgttcaaacttaatttaatgaacgtttttgtgacgtttactttgggtggaatttttttgattttaattactactttcatcattgcttttacacctttgcgcgagtttatcccggggtattcttcctctgaattaaaaaagaatgcgacagaattagccataaaatcagattcacttgaaactgctttaaagaaaaatgaggcctatataaaagggattcagaaagttttaagaggagaactggaatatgcaaaattcaataaagattctattttagcagaaacagctgagccttcggaggtggatatgaaagcttcggaagaagaaattaaattaagagaagaagtagccaaaatggagaaggagtcgggtgaaaaatcccgaaataaaaagaaaagtgacaagaattaatacctcaaacaatgtctattaagtcagtagcagcaaaattatttgccagcaccatatattatcaaactaaggcctgggccaataaaccggtcgaaacccaacaagttgtatttaagagtttaatacacagtgccaaagaaactcagtttggaaaagatcatcattttgataagataaaaacagttcatgattttagaaaacgcgtgcctgttcgggattatgaagatttaaagccctacatcgataaggtgagaatgggggaaaaaaacattctttggaaaggaaaaccgctttattttgctaaaacttccgggacaacttccggagccaaatacattccgcttaccaaagagtcaatgccttttcatattgaagcatccagaaatgcgattctgcattacatttatgaaactggaaatgctgattttgttgatggtaaaatgattttccttcagggaagtcctattttaattgaaaaatacggaatcaaatttggaagattgtcaggcataggggcacattttgtaccaaaatatcttcaaaaaaaccgaatgccatcctgggaaaccaattgtattgaagactgggaaactaagattgacgccattgttgaggaaacgattgaacaggatatgactattatttcgggaattccgtcatgggtccagatgtattttgagcgtttacaggaaaaaagcggcggtaagaaaatcacggatttgtttaaaaactttcaattgtttatttacggaggtgtaaattacgagccgtatcgtgccaagtttgaaaatctgatgggaagaaaggtagatagtattgaactgtttcccgcttcagaaggctttttcgcgtatcaggattctcaaaaagaaaaagggatgctgctgttgctgaactcgggaattttttacgaatttatcaaagcagatgaattttttgaaccaaatccaaaaagtctgaccattggagaagtagagactggtgttaactatgctttgattatttcgacaaatgcggggctctggcgttataatattggagatacagtacagtttacttccttatttccacacaaagttattgtttcgggtcgaatcaaacactttatttcagcttttggagaacatgtgattgcaaacgaggtcgaaaatgcgatgaaagaagccacgcaaggaaccaaggttgtaattaatgagtttacagttgcccctcaaataaacccttcaaatggattaccgtaccatgaatggctgattgaatttgaaacagaacccgaaaatatggacgcttttgcagaagcaattgacagttcgatgcgaaaacaaaatatttattacgatgatttgattacaggaaatgttttgcgtaaagttgtggtaagtaaagtttccaaaaacggatttcaggactatatgaagtcacaaggaaaattaggaggacagaataaaatcccaagattatcaaataatagagatattgctgataatttaaaagtaaaaatataatgaaacaacagtttagtaacactgatgttttatgaaagtataggttttaatcactactttcgttgattgaagaatacaaattaaatcttcttcctaagaagattttaaaataaaataagcatgaaagaaaccaaacatatatcaagatcaagagcacaggaatcgtctgccgctatagaaaaaatgtacattacaatgcgtcacttattcaaccgtggtttttataaaccaatgggagtttcaggagatagcttacgtgaatcattactggcattacgtccggagatatacggaaatataggggaagaaaaagtagaacttaatggtcttttatacgtaatagaacgtcttccgataggaattgagcaatgtcgtttcattaatttaacttcagacgaaggatattctaaatcacattttcaacccattgttcctccaaaaagaagaagaaactgttatcgtattgatgaggagcaaatgaatgttgaaatcactcgcgggcgatcagacatttatgatattctaacgcatttgacttttattttcatcgaatcacataaaattaaaaacagagttttattagatgatggaggagaggtttcccgcgattggatgaaattagaacaagccgtattgcaaaccaagaagctttctcaaatagagaaagaaaaagcaatttcgcatgttgctaatattctggcaagaacttttgaagaagttttagacatttatgacgcttttggatcagagaatgctccagatcgtttccttcacgttatttactggttaggaaaactggcgattgaagaagtgattgacaataataaacgtactattacttttagtccggttttaagagaacgtttagggcaccatattcacggtgaaatctgggcaacgaacatcaaggaagttcttaaggcaaacaatctgttaaaacgtccaattcatgtgattagtgcaaatatgcacagtgtgatgaattcaatttttgcaacaccgttgttgaaaacaaaattcaaggagaagtctgatttttatatttatgaagagttaagtaaatcaggtgccaaagaaattagaggagttgtagaagagctggcgttaaaaaacggaatgatttcgctgccggatagctctggaacgaatatagatgttcagatttttgatacggctaaaattgactggggaaaaacagccttcccaaaagcaaaattagaagaagaaaaaccggttattattgtaatggattatgcatttggagaacaggcgtatgaaacgattgatgaacttttgaaaccgtataaaaaagataccttattgaacgtaaaatcggtttcgataatgggtaaagccggaattctggaaggtggaaaaggagatattatgattcctactgcacacataaatgaaggaactgcggataattatttctttgaaaatgaattaacaggagccatgtttgaaggaaatgatattgctgtttttgaaggagctatggttactgttttaggaacatcattgcagaacagagatttgttgaaatttttccacgaatctacctggggtgtaattggtcttgaaatggaaggttcttattatcagaaagcgattcagtctgcttcaaaaatcagaaaaagtgtgccacatgatattaaagttcgctatgcttattatgcatcagataacccattggaaacaggtagcacattagcttcaggtggattaggtacaaccggtgtaaaaccaacgtatttgattaccattaaaattttagagcagattttcaacgtaaaataaaacttataaatgagtacaaaagtatcccaaaatcaagaggatcaggagattgacttagccttaatttcaaaaaaagtaaaccatttttttcagagaattgatacctctatttttagggctattcagttttttattcgaaactggattttggcagcagtactcattttgttaggttttttggcgggatggtattttgatgccaatcgagaatcgtatgataataaaattatagttgcaccaaattttggaagtgtagattatttatatgcaaaaattgacttaattgatgcaaagattgcttccggagatactgttttcttaaaaaatattgttggaatctcaaagccaaaaataatttcaaaaattgaaattaaaccaatctcggatgcttttaaatttgtagaagataaagaacaaaattttgatcttataaaattaatggccgaagatggtgatatcaataaagtattagtagacaacgttacaagtaaaaactatacttttcatacgatttcatttatttctaaagaattagtagatgataaagaagttatagagccgttattaaaatacttaaataattcggaatattttagttcgattcaaaaaataggattcaagaatttagaacagcaaattgctcaaaatgataccattattgctcagatagaccatgttttgaaagttcgaatccttctgcgttcacaaaaagccactctaatcgagtggtttttttgttttatatagttttcgtggatagctgagcctgatagtgcatcccgattttatcgggacggtcgaaggttcgaatccttctgcgttcacaaaaagccactctaatcgagtggtttttttgttttatatagttttcgtggatagctcaggcggatagtgcatcccgatttttatcgggacggtcgaaggttcgaatccttctgcgtttacaaaaagccactcaatttgaacatgctccaaatagtgtctaactttttggggtatgtttacttaattggggtggccttttattttgtatggattttagggatatagctcggtaggagagagcagatcaaaaatgtgcaagcatttattgcatcatgcccttcatttattacatcagatgcttcaattattacaattaattacaggtgaattcttgttaaatcatatttgttgcgaattgcaaggttccgagaagggtaaaccattgtgagggaaataaaactgggattattccaaaccaaaaatgaatcttgcatcaaaactgtaacaaatgagtctaactaacgtcttacgtgtttattatcaaccaaaaaaataaatttaccaatggaattaatcattaaaaacctggacaaaaagtacagtaatggcgtgcatgcactgaatgatgtgtcacttcatattaaaaaaggaatgtttgggttacttggaccaaatggagccggaaaatcttctttgatgcgaacactggctactttgcaggatgttgacagcggttcagttactcttggagacattgacgtactgaacaacaaagaagcggttcgtaaagttctgggttatttgccacaggaatttggcgtatatccaagaacttcagcggtggaacttctggatcatttagcgttgctgaaaggatttgataaaaagtctgatcgtaaacaaatcatagaacaattactggtcaaagtcaatctgtgggaacatcgaaaaaatgctgtgagcagttacagtggagggatgcgccagcgttttgggattgcacaatgtttaataggtaatccacagttggttattgtagatgagcctactgcaggattggatcctggcgagagaaatcgtttttataatatcttgagtgaaattggtgaaaatactgtggttatcctttctactcatattgttcaggatgttcgtgaactttgcacagaaatggcgataatgaaccaaggaagagttttatttagcgggaatactgatgatgctttattgcaagtgaaaagtaaagtttgggagaaaaaagtaaccaaactggaattacctgaataccaaaaagactacaaagtcatttcgaataaattagttggcggacaacctttgattcacgttttttcgaatacaaatttgaacaacggattcagtccggcagaggaaaatctcgaagatgtgtttttcgcgaaattaaacgaattagtttaagaaaaaaatggtggactaccaggattatagaaagttagtctggtagcccctcagtattgaaaaacgtcaatcttttatccctttttaaacaaaaaattatgtggaaatttatacgatatgaattaaaatattggttgcaaacaccaatgatatggatctttttattcattaataccctgatcgttttttttgcggtaggatcagagcaggttaccattggcgaaagcattggtaatatacacaaaaatgcaccttttgtagtagaacaattctacggcatactttcagtgatttgtttattgatgaccacagcttttatgaatgccacggctaaccgtgattttcaaagtggaatgtatcaatttatattctcctccccgatcaaaaagagggactattatttcggaaaatttattggagcatcgattgtttcggtaattcctttactgggtatttctcttggtgccctgattgccccaatattagctcccatttttaatatgtgtccgacggaaaggtttggcgaaatcatttggtccggacacttgcaaggtcttttggttttcggaattccaaatgtcattatttcaggtgtattactatttgctttagcgattatttttagaagcaatattgtatccttcataggggctatgcttattttggtattttatgtagtctcttccggatttactaaagatattcataaagaatggttagccaatttgctcgacccttttgggcttcgtccgtttaagattatgaccaaatatgccactgttgctgaaaaaaacttaaacgcagtctccttgcatggcgatttattaaccaatcgtttgctctggataggagtaagtttgattattttagtggcagtttattttaaattttcttttaatgctaaaaaagaaaaaagtaaagaaagtaaaacaacaaaagtatctgaagttccttttgttgtttcaaataaggtatttgaaacaacaaaagccgatgttttttcgataagtaccttttggaatttggtaaaatttgaaactaaatccattatcaaaaatccgacttttattatcattatttccattggaatgattaatctgattgcaagtcttacgagttttacaggccgttacggaattgctcagtatcctgttacttatgatgtaatcgacactataagaggtgcctttggtatttttatgattggatttattactttttataccggcgttttagtgtggaaagaacgcgatgccaaaatcaatgaaattcaggatgcaacccccatcagaacgggtactttattctcctccaaattggcagctcttattattgctttagccattgtttttggcttaacaatagttgttgggattatttcacaaacagctcatgggtattacaattacaaattggatgtttattttaaatcaataatgttggtgtctttgctgagttattcttttatggcggtaatctctctgttatttcattatttaatcaataaccgctatatcgcttattttgctttcgtcacttttgttatcgttaataatttcatctggggattgctcgaaatcaataccaatatgttgaattttggtaacacaccagccattacttactcggacatgaatgggtttggaccttttgtttcctctaccatttggttcaacatatattgggtattgttttgtttgatcttgtgttttgtcattacggtattttacattcgtggtaaagagcagcaatttaaatacagatgggtaaatgcaaaagtacagcttagaaaaaataagatttcgatagccattagtttgattgcatttggactttgcggtagttttgtttattacaataccaaagttttaaacacttatgattcttcaaaagaacaggagaacaaacaagtggagtatgagaaaaagtataaaaaatttgaaaatttggtacaacctcgtttttataaattcaattacacgattgacctcatgcccgaacaacggaacatgactgcaaaaatagaagcttgggcaaaaaacaaatctaatgtatcgatacgagagctccatttcacgttgccacaattatctgatagtttaaaaattagtattgccggagcaaaattgaagctaaaagattcccgtttagagtatcagatttatgaattagataaacctttattgccaaatgattccattaggattaacatcgatgtaaagaaatggacaaaaggattcgaaaacgaagttagttttacacaactgacacaaaacggaacctttttcaataattcagatattttaccttctttcggatataatagtgacgtggagatttcagataaaaacaaacgaatcaaactgaaattaccaaagagagacagaatgccaaaactggatgagggaaatctttcggccagagccaacacctacctcggaaatgattcggattgggttgaagtgaatactacgataagcacatcaccagatcaaacggctattgctccgggatcattattaaaaacctgggaagccaacggaagaaagtatttcacttataaattggatcaaaaatcattgaatttttattcctttatttctgcaaaatatgaagtagtgcgcaaaaaatggaatggcgttgatttggaagtttattatgataaggaacatgcctataacgttccgaatatgctcaaaagcatgcaaaaatcattagaatactatacgaagaactttgggccttactaccataaacaatgcagaattatcgagtttccaagatatcaaagttttgcacaagctttcccgggtactatgccttttagtgaggggatcggttttattgtggatttacgcgaagtaaataaagatgatatcgatcaggtttattatgtcacggcacacgaaatggggcatcagtattgggcacatcaggtttgcggagccaatatgcagggaagtgaaatgtttagcgaaggtttcgcacaatattctgccttgatggttatggaaaaagaatatgggaaagacaaaatgaaaaagttcctgaagtatgaaatggatcgttatttaagcggtcgaagctctgaacttgaaggagaacagcctttgatgaaaaccgagcatcaacaatacattcactatcaaaaagcaagtgtcgttatgtattatttgaaagaaatgattggggagaaaaaagtaaatcaagcgctgaaaaatttggttgatgcttatgcttataaaaacccgccgttcccaacttcgatagatgccgtaagtgaattgcgaaaagtaactcccgatagtttgcaatatttaatttcggatatgttcgaaaacattaccttattttcgaatcgaatgcttgaagccaagtataaaaaagtaggggctgagtacgaaatcactttaaaaacgtcttcagaaaaattaagatcggatgcacttggaaaagaaactcaggtaccggttgcggattatattgatattgccgtttttgcagaaccaaaaaatgattctggtttaggaaaagttttggtttacaaaagattgaaaataacaaaaaaagacaatgtttatgtttttaggactaaagagaaaccttttgaagctggtattgatccctacaattatttgattgatcgaattccggatgacaatttgaagaaagcagaggattaattttttaagcaaaactgctaaaatatcgatttaattaaaagattttaaatgaattttaccctttttttaagggtttatgttaattcgaatgcttgtgcgttcgcaaaaagctactcaaatcgagtggctttttttgtttatatcagtttcaactacatagttcgggattgatacaaaaaatggatcaggtttaaaagttggtaattttgaaaaactaagctaagtggagataaacattagcaatgggttcagccattgtaataaagtaaatctagtagagaataacaagagatcgcgacagtgctaatctcaccagattaagccactggcaataatcgaatcgagaatagaccaggagaagtaaaaaagggtttagctaggatgaatgatcctactttgtttggaaatagaatagctaaaggttttgaagagtattcttttatgaaatcagtaattgttgactaacatatcgaatcttgcagctaaaaaaatcaaactttatacaaaagctaaagttgtataaagtttgatagtattttaagaatgcttcttttaattctcaataaacactcctatttgttgcagatgtttttcggtttgatatttattaaagttattccatttcggaggtgaacttgttttttttccgtacataagatccaagcagacgttattgtctttatatttatcgtgtaaaacagccaaaatcttaaagaaaaactgatccagtataacaatgccttcaaattcggattttagttcattataattactatctgatggatttagtaattgcaataaggttaggattgtgtctttttcagtctcagtgatttcggtcaggtagccagtttttaaggttttgaatactaaattgttccaaaccttactatcatgtccccattgaacgtcaggtagatttaaggaatgttcgcaaattagaataatcgaaaaaagaacatcatttaagtattctgccggaaattcgtcaaaacttctgaattcaaaaccgctttggtacattttctcctgattaaaatccagacccacttcagaaagtaattcgtactccatttctgtctcaatctggtcgcgccaccaaatattatcttcttttttgaattttagcaattttctaaagtcatccactttataggttagaattttgcctttaggcattgctttattaaaagttcctacaccgatgtagcgtgacatggcatttctcatagaacctagagtaaatttcttgtccaaactataggtgttgcttatcactcccataatatcaggacttccaagggtggcgataaaaaaaggctcgaaccattgcaataaataaatagcattggcatgtgttttattaaaatcactataatcgagaatccggctgtcttttgttagcgagggtaaagtaatgtgaaaatgatatgttccgttattaaacaaaacaagattttcctggttggtcataaacatgttaaggccattgttgtaatccggaaaatttaatttaccattaagtattgctgagtcattaattttatcaagaaataactttttggttgcctttaattctttgcatgaatcagctattgttcgattttcaaaatatttagttacaaattctatagaatcaccatcgaaatgaacagatcccatcgttttgtttctttgggtaatcatgctttgaatattgtatggttgatcttcaaggaaaagttccataatggattttccaagatattccggattttcaagtggttgtgtatttgcttcagcggattcggtagtaggaaccaatgattttacgggggataatgttttgtgctgatagtttatatccagtttttccagcgaatgactgttcatcattctgctcactttatagctctcgtttgtgtcaaaagcttttttaagtacaggtgccaaactttctggtttgtagcattttcgatagtcaatgctgtatttttcaaacccaatttttttttgtataaattcaccagaaactattagggattcttcaaattgcatgtaggtttcgttttctaatccaattccccaaaaatatttttttgtctgattgtctttcatttatactaattttcttttttaaggttgttttaaagtgtttatttttatgctaaactaagaagttcatctactgaaattctgagtcgtaagatcttttaacagataagacctaatggcttgcatctcttaaaaaagctttgttttgtttgtaaaatggtatgaattaatagtagtctgggaagttgtgtacttgtatcgattgaaaaattgattaaataattttataatgagggtataaaattattattcttgttaattatctttttatcaattgtttaagtaagcgtatagccgaattacaactcttgcgatttctgtttttttcaggttgcgaaagtagttctttattatgttatttccaaaccgttaaaaggttgtaaatcagtaatgtttggttatgcggagaattgaaggtattctttttatttattcatggtaataaaatacgtaggaggagtataattcgtcattccaccagtcttttctaacttctgaaaaataattataattaagttttcctgcctgtgattgcaggggatataggactacgccattctctcgataggccagatttaaatttgtttcaggaacaacgggaacgatatgaccagatagtcctttttctcttcttttggcacaaattattcctattccaccattggtatttactttgttttgaatttcatcgggagtaaacattctttcccagccaaattgaggaccccattttagaaaccaatcgtgtatagcactggagtaaatgcgttcaacggtttgctcaaaaacagcttccacttcctttccttgcactattttttcgagtgcttcttcagtccaccaaacagttgggagataaacgccgctgaaatagcaataatcataagagtaaacattacagtaggtatcttctactgtcctttgatatctaatattggtttcgacatcgagtttatcgataagttggctaatgctttttttcttactggaaacatctgtttgatctctaaatggaatgctggaatcagaaaggggtctttctttcatgtaaacagaatctaaacgggattggggatccggtaataaatcggctttttttagtttactatcccatgttagatgtccgtctagtgttaagggtgtggtttctgctgtatatttctccatcttgactgcttattatgaactagcataacaggggaatcaattgtgtccatagtgttactcggctaggtaaaaagtaaatataagaattttaagctttccaatatgtttttttaccgccccaaaggttaatagttgagttaatcgaataaataggagacggacatttttttatattgaagaaaaaagagtgtaaatgattaattaataatgatttatgattttgttgaattttgttataagaatttcgggcaatatctgttctggaaaaatagcaacgcccgtcttatcatgctgtctggttagtttttagagagctaaaaggcaagggagcaaaggaaaatatcatgcagacaggttagatttagaagtttgattggattagcttacgtggatttgtttatatttacttctttcaatatatatttatcatgaaattaagttcttcttccgctcatactttattttttctgtttggccttttcttttatggactttcttcaaatgctcaaaatgaatcctattcatctgaggataacgaagaaattgccgacaccacttttgtgaatttaaaagattacagtagtgatttcgtttatgatatgaaatatgctacagaagataattttttgaaggctaaagtctatgattgtgccgaatgtttgttgcgttataaaacggtaaaagcgctgatagcggcgaataaagattttatgaaagatgggtgtaagataaaacttttcgattgttacaggccattatcgattcagaaaaagatgtgggagattgtatcgaatccggagtatgtggcagatccaaaaaaaggctccatccataataaaggaggagccgttgatataactttagtaaatgcgaagggagaggagctggaaatgggtactaattttgatttttttggcattgaggccagtcataattataaaaaatttccagtgtcagtcaaagcaaatcgaaaatatttaaaaagagtgatgatcaaaaacggattcaattcttttgattcggagtggtggcattataatttaaagacaggtctaaaggataaagtctcgaaccaaaagtggaaatgcgattaattattcaacacatcttatgttttccatgaagtaagtattcggatggtaaactttaccattcagttcagaggttaattctctttttacaatgtaatcttctatattggtcagatactttattcgcataattgaaataggggattttttgagctcttcaaaaccttctttcatgaacataaaaataccggtattgatacgattgtcaaatcctttttcatcatgaataagtgtaccacaactttctttgtcgatatgaattaatgttacgatttttccgttttctaattgtaaaaaaacttttgaatttttatcaaagcagttggcttttataaaatctttacttttttggataagttgtaaatttaaggtcggtagaccgtcagtttgtgcgagcgcgaaaaagacataattaaaagtgcctccaaagtatttttcgctgaccatgtagtcgtttgttactttataagtccctagggagtcagttacattcgcactgtattcacatggtttttgtgcaaaggcggtaaaggttagtaaaaaaaaggttagtgtaattagttgtttcatttttaagttatttttctgcaaattaaaactattttgttatcatttttatccgttgtaaaaaaacaatacaaatttccgccgttttttattttccatttttttcgaatgttttctactgtgtccggaaagtttcgcgttgtgatattggcctgctgattggcaagttcaattttcatctcattcttactgtaggagattgttttttcgatttcaaaacgtcgtcccggaaactcgattaaagcttctgaggtatagagatgggaatgtttatgaagtttgttgatcttaaaaatagtacttacttcatcgaatcctcctgatttcataatagacgagttgggctcgtaaacgtatttttgaggaagctcgtaagaaggaagattaatttcatttcctaaaataaaatcaaaagtctcgattttatcttttagaatattggccgtttttatagtgattgcgccggaataatttttacgaatctcaaaaagcaattcttttacttcgttttcaagggcaataatatgtatgtttttaacaaactgtagttcggataatcctgcagaaagatctaatagcggagctgtttttatcagtatggaatctgttttctcaaagtaaaaatttagcaaatcaggaacattgggtaagcagtctttcagcataaaaactttacctttagcgtcgtttctgcgggacggatcaatataaatccaatcccattttttattggattgatttaaaactgaagtagaatcatcagcataaaaagtacagttttcgactttaagctgtttgaaattatgtttcacaatttccgataaatctttattgatttcgcaatgcgctatgtttttgaatttttgagagaaatagtaatcatcgacaccaaaacctcctgtaagatcaattaaactctctccggaaagtaaagttgctttataagcggcagttctttcggatgaagtttgttcaaccgatattttagagggataaataatattttcggcagcaaaccaggttggcaacttgtcttttgctttcgattttgcttcaatctgatttaaaattacaatccagtctatttcaggaaatggatttttctgaagcgctaattttgtaatcgggacaccactattttgagttatgaattcctgaatgtttggggctaaaatagcaatattcaatgttaaattctttcggttaatacagagacaattttgttgtcaggaaaaaattcctttaaaattactttcaccatagtaaaggccggaatagcaataatcatcccaacaattccaaaagtaattccactgattaaagtaatcaggaatatttctaacgggtgcgaatttacgctttttgatgagattatgggctgactgatgttgttatcaatagcctgaaccagtaggaaacctataagcacatagattgttttaggtagtatttcagattgaaaatcacttccgatcatactaatcatggttaaaagccctgccagtatggttcctataattggtcctatgtagggaataatattcaaaatggcacataaaaaagcaataacaaaggcatttttatttccaaaaatcattaaaacaattaaatacaggatgaatacaaccgttaactgcagtaaaagcccaacaaaatagcgggtcagaaaatggtttattttggttattgaatttaagattttgtcttcattggtgtcaggaagaatttttcgggcactaactttaaaggcatcctgatctttgataaagaaaaaggtaataaaaaatacagataccaatcccattcccatattggccatgaagcctataattgaattcaggaaaccagtaaagtaactgaaatcgattatggatgtgattttggattcttttaaaaccttattgagatccagatgctgtatattaaagtaattttcaatactgcgttctgtttcgagaaattgctgttgcagagtttgagtatcgagtaatgataaattgttggcttgcgaaatgattaatggtacaaacaatagaataaaaccaacaattgcaagtatgaataagattagcgctgtagtggcggccagtgaattactgaactttagtttattctttaaaaattggattaacggattggcaattaaacacaataacagcgaaatgcacagatagacaattacggtctggatttggtatagaaaatataggacagctgcgacaattaggattgttgttagagctcttaaaattccgttagatattgttttcgatgttatcatgattcgattttagatgataaatataggaaaaagcttttgaaattttatagtaaacaaaaaaagcgggatgttgccatcccgcttttcagtttgtcttttatacttgttttgtattagattccaaaagaagctcttggacctccggtaacaaatatcgcagccattctgcttttttgtccttgagagaacatatacattgcgttgtcatcaacgtaatccatgtagttcatcgtcatttcaacaggagttcctgaacaagtgctatagtgaggataagctggtacaccatagtttgctgtgttgtgtgtaggagtatctgatactaaatcgcttccacaagttgcatctccccagatgtgacgtaagttcatccagtggcctacttcgtgagtagctgttcttcctaagttaaacggtgcatttgcagctccggaaagaccaacatatttagggtcaactacaacaccgtctgtagcagaagctcctccaggaaattgagcataacctaagattccgccaccaattgtgcaagaccaaaagttaagttttgtagttggtgaagttggtgcaataccaccctgagctgtttttttcatggcgtcatttgttccccatgaagttttggtagtcgattttctaattacctgatctaaaacgaatgtaattccaacatttgcttttacaccagaaaaaagagctggtacactattgtaatctgaatttaaggcattgaaatctttatttaagacatcaatttgcgtttgaatttgcgcattagaaatgttttctgctgcagttctgtaaagaacattaactacgaccggaatttcaattttaccgtttacaagacgttttgtcaagatggcattttcggtaaatgcattgatttcgttcattctgattgctaaggttggatcagctttcagttgagcttctaaaacttcctgacttgcgcatccgcgatgtgcaatagcttcaacttttgaatccgcagattctgattggtcgttttggcaagaaaacagcactaatgctgtaaatgcagtaacaatgatttttttcataataacttgggtttttgttataaaaaatttgttttggttaattataatgcaattttataacaaaaaaattattgtaacaaaaaaaacagataatattatttgtgagaattttacaatcccttgtataatctttgaatgaaataagaagagggactttcagtccctcgtaaaacaaacctctgcactttcagtgcagagtggtttagtttttcgttttcattggagttttatctatgatttttcctttccggaaggtgcttttttagcgtcttcttctttttgtttctcctgtttttgtttctcttctttggctttttcctctttttctttattgattttttcctgttgctcttcttttttctctttagcttcctctttctgtttttccttttccttctctttttttctgaaataacctctcaacagaaagttatttttggcagcttccatattatcgctaaaacctttggtaccgctttccagatttgaaagggtattcgaaacgctattggccattttatcgtcgcgaaccagtctggccaaagctccgtttccgttattcatactatgactaaaagtggcaagttcgtcagaaataatgcctacattatcgacactttttttgacacttttcatgatgtcctgcatttctattccgtcaatcgaagcaatggcaccgttgttttcgattattttttgtgattttataccgggagaaatagtgagaaccttgtcgcccatcaatccgtcagaaccaatgctggcgcgagcgtctgttttgataaattttctaacatcgtctttaatcaccattaaaaccactactgacgaatcattaatcagtctgatttcttcgaccgtaccaatgttaattcccgaaaaacgtacattgttgcctacttccaaaccgctcaccgttttaaatcgggagctgatgtgaaaggtggagccaaagaggtttttttgtttgcctataaaataaatggccattataaaaagtaacaatccaattgctacaaacattcctaatttccaggtatatccagattgtttatccatgatttctactatttattttgcgttattcaaaaaatgagcgtacccattcgtcttcgtctttttccagttcttcataagtcccttcggcatgtattactccgtcttttaaaaccataattcggtcggctgtgagttttgcacaagccatatcgtgagtaataatgatggaagttgttttacgtttgtgtttgatatcgagaattaattcgctgatctcacgtgaggttatagtgtctaatcccgttgtgggttcgtcgtataagataatttccggttttaagattaatgttctggccagaccaattcttttttgcattccgcctgatagttcagacggcattttatctatagcatccgccaaaccaacattatctaaagcttccatgacttcagtttcaacttcttccggcgttaagttctgtttgtgtttttgtaaagtgaaagccagattttcgcgtaccgacatggagtcatacagtgcaccgctttgaaataaaaatccaattcgaaccctaatctgatttagctcaggtttcttcaggtttaatacattttcgttaaagacttttatttcgccctgatcgggagttattaaccccacaatacattttatggtgaccgattttcccgaaccggaacgcccaagaatcactaaatcttctcctttattcaccgttagatttacaccttgcagaacagtattgtttgtaccaaaagtcttgtgcaaatccctgatctcaatgattggagttttgctttctgctttagttttaagtgctgtattttctttttcagtaatcatctttaaaagaataaatcggttatttgaacggcaatcatatcgagtataaaaatggtaagcgaagccgttacaactgctgaatttgctgctttccccacactttcagtcccattagaggcattaaatcctttaaaacatccaatcattccgataaagaatccgaagaagaacgtcttaatggttgcaggaatcagatccagatatttcagtgattgtaaaatttgagtcagatagcgatagaaattaacatcaccgtggatattaattccaacgaaaccaccaataatgcccacagcatctgcaaaaatgaccaaaatgggaaccattaaggtacaggctaaaattctggttacgaccaaatagttgtaaggattaattgccgaaacttccatcgcgtcaatttgttcggttactttcatcgatcccaattcggcaccaattcctgaggagatttttccggcacaaattaaagcagtaattacgggagcaatttctcttattaaggaaagggcgaccattccgggcaaccaggattccgctccaaaattgaccagtgtaggacgagattgaagggtgagtaccaatcccataataaaaccggttatggctactaaaggcaatgatttatatccaattacataacattgttttataaactctttggcctcataaggaggaacgaaaacttccttaaaaaactgcttcgcaaacaaagttgcatttcctatttcggtgaaagtattttttagagagagaatcaaaataataggtttttagtattaaatcgaaaatgaaacaacataaatcttaaaagacagttgtagcctttatgatcaaagattaaagttacttgataactacagaagaaatcttacataactttttttgaagtttatataattagcattgtatgaggaaaataaaagcagaaaagttacgttagggggtgaaacaaaaaaatccctttgtttgaaaagggatttttgacgttttgagtttcaggtttattgttaagactgcgtctgaaagctataatattttcgtgttataagtgctatgggaagaccgatgcagaacatcaggatcaacatggaaaggaataacgggaaatctaagtgtttttcgggaagcacaggaaaggtaataggcagcacaattaaattcataatgatccacacaaaaattccataaaggaatccggaaacaattgcactttttttgagaaaaggcagataaggataaatagtaaaataaaaccaggcaaagcttagcgcaattaagtaatggaatccaagaccgaagagggccattattgagcctccactgtaggcttcctttttaaaaacaccgcttgcaatggattgcaacagttttattgcagtggttttttggagtataaaagcataaactgtaatggctgccgtcacgtctaatgttccggcaacaagccaggcagttaaaatggttttggttttggatttcataggttagttttttacaacattataaatgttcttcaattgatttaaatgtcttttggcatgcacgttacaaaaaaataataattcgtagatcgttaaatttccaatacccggtatttcaaaatccatacaggtgagtgttaaatcataattttcggcaatatgctgcatttctttttcaattctttgaagacttgaaatcagctccgttttatcatactcgcggtcttccggatatataaaatcaggggagtcgtatttggtactgaaatcgagaaatatcccttgaagcgctggaattttttcatcatagtttgctgctagtttttgggtattagcctcgcaaacctgacgcagtcctgaggtcgattttataatatgacgggcaacctgtccgccagtccagctaccttcaaacggtacttgattgacttcgctttgcgtaaaaagagaaacagtatcggaaaattgtccgaaagtcgtctcgatatcttgttttaattctgttttcataattttttgttttttactctattatagaagtgatccaccagacatttccaaacgggtcagtaacaccacaagttctgccgtactctttattgctgactcccattatgctcgtagcaccattttctaatgcttttttataggtttcgtccacgttgggtacatacacaaatagattagcggtttgtcttgaccagtcttcaactacgtctgtaaccatgatagtacttccggttatgataatttctgcatgcataactgttccgtcttcgcgtagtacatgatcggaagaagttgttgcatcaaagactttttgagtaaatgttataaattgcgatgcgccatttaaaatcaaataaggcattatggtctgatgtccggatggtaaattcatttggttagatttgaaggttgatagtgtttcaaatttacaaattttatcaataaaactttatcaatcagctttttgtcgtttttttggactcacaaaagaacttcacaatgaaagccataggaatcaagaagttctattattctttgatttgaaattgacgatgcatgaacgcgtaaaattctatcacagtcttctaaatcaaaattaatatgactgtttggaaaatgttcaagaagtttctccacaatcagtagagattgcccgatttcctgaacatttgttttataaacttctatcatcatttcaggaggttataaagcgatgtttttataacgctctattttatgataataaacgtaagaaatcgccagaattactaaaaagattaaaggaaagaaggcctggaaattgatgccgtctactgcagcgtgactgatggaagcaaaaataaagtcgaagccaaaaccagcgtaagcccattcttttatgttttttggaatggaaggaatcaccaggactaaaacaccaagaattttaaagacaactaaggcatttccgaaatactcaggatagcccaaatgtctgattccttcttttgctaattcggtttgtgaagttaaggccggcattacaccttcgaataaaaagataatagtagtagtgatccaaaagataatttttgcttttttcatgggatagtttttaaatggttgttaattaattcattacaaacttacaattcttatcttttgaacagactacacatttacgactattttaggggcatttgggacagagagggaggatttctgattttagattttagatttatgagtttagattttagagccaagaggcaagagtcaagaatatagaataaagaataaagagaatagattttgaaacttgaaacttgactcttgactctttcttctttactcttgaaacttgaaacctgaaacctggagtttggaatttaagatttggaatttgctcccaaaacatagtttttaatgacaaataagtcttcgaaacctaatctcgtgtagatgtcttttcccatggcagaagcttgtaactgcacgtaatccccatttaaatcgatggagagatttaacgcatatttcatgatttcctcagcaaaaccttttcggcgcatttcgggaattactcccaaaccatgaattccaaccacattttcggtgtgaaacaacataaatgttccgataggttgattgtttaaagaaaccaggtaaaactgaacatcgtgatgattatgaatcaggatttctttgctaatcacataaccaaaagcatgaggatacagatctgcccatattttagcgtcctgttcagtggaaactctgttaaaactcagattgttttgaagtgcaaatttctgatctaattttaaagccatcgcaacctgttcactttttaatgagaaaccataggcatctagtatttcatacgattttgttccgtagatatcccaataagcgaaggctaattctgaattggcctgcatggttttagtaatttcaccgatgtcatttttagaaatgtctttttgaaaccacaatttattaggccagcctgaattttcgactttgctatattcaaaaagaggagttgcatggtaggataggaaagaggaactaaccgttttccacattccggtaagattatttaagttgtcttcgattaagtttatatttttcatttgaatagtgattataagaatataagacaaagatacttgcggcttttataggaaacctttacatatgttgatttacaaatctttttcgagattttttcggatacggcttagctgagtaggggtaatccctaaatgggaggcgatgtgaagcaacggaatgcggtctgcaatatccggatgtttggatagaagatttaggtatctctcggtagcattttgcatgactaaagcaatttcgcgttgttccttttcgattacccagtttttttccaaataggcaatgtaataatttttgagatcgttattctgttcaatcagcgctcggtattttttgtagttaagctgaatcaggatagaatcttcgagggcttctatggtgaagtgagaagcagtttgctgcagtaaagaagcctttgaaccggcaaaatcaccttcaagaaaaatatttttgttatagagggtacccgccgcatcggtgatataagcccgtaaagcgcctttgattataaaatatatttcctttgcaatttgtccgttttgaagtaaaatgtctccttttttaatggattgaatttcagcaatagctgcaattaattcccaggaagattctgaaataggagcgtagccttcgaagtttatctttaaatcgttgaggtacttattttgattgattgacattttgattgaagtttttcctatcaaaaataaggaaatattgtggattataaggtacgcagatgacgcggattcgctatcgcgaagacacggattgacgctgatttttctctctcattttgcagaacgagaaaaaaaccgctaaaaacgtaaaagttatttagcggtttaatggaaaaagttcttcacattttagagtttaatcggcgtaatgataaatactttttttaatggtatcttttattttttcaagcgttacttcggttacaccgccttcataattcatactaataaggactttatctttgatgatttcgtagtcaattgagatcaatccatttttatttaccggtacagatttgctttcgtttgggatggaacttaaaaaataagcagattcttcaacctctttattttggataatattttgatagacctgagcaagatccgtacctttcaagatacattctcttccggaccccatttctacttcaacatccttacaatcttcttttttctcttgtgtttctttttttacagcagggcttgtttttaccggttcttttaccgcttttgcttctttctctgaattgttttctttacagtttgtaaatagtaatgctaaaattgcaaggcatgcgattcttttcatgggatttaatgtattgattaagaggtttgttttattaatattcgatacgatattcattctttggagccgttttttgagggcttgacaatttcaaaagtaagaaatattgcggattattgggtacgcggatgacgcggactaacactgatttttttattctcgtcattttttatgcgcaaccttgtcatcctggcgaaggaaggatcacacaagtaactccgtacagaatgtcgtcaatctttgtcgaatcccacatgtgatttgcttcgcctattcagtatcgctcgagtttcccttcggttgaaatgacaaaaatgagaataaaaaaatcagtgttagtccgcgcttccgcaaggcggatccgccgcatccgcgtgccataaaaaaacgccatgaaactataagtctcacagcgttctcctctcaaaaaaataaataattaacgggtattatttccagccaccacctaaagcacgatacaactcggtattggcagatagctgctctctttttatgttagccagttctagctcactttgtaataaattagattgcgcggtaagcacttcaagatattccgccataccatttttgaacaacaaattggcattttttatcgcttgctgcagcgtttttacacgttgttgcaaaaaggattcctgttgctgcaatttctctacttttaccaaagcatctgatacttcactaactgctactaaaacggattgtctaaaattcagaaccgctttttccctttcggcaacggcgatatggtattgtgtttttacttttttattattcagcaaaggctgtgtcaatcctcctgcaagagttccgaacaaagaggccggaatattgaaccaattgctggcttcgaaggagtttacaccaccctgagctgtaattctaagtaccggatacaaattggcttttgtaattcctacgctggcattcgcggctttaagagctagttcggcgctttttacatccggtctgcggcttactaacgaagacggaatcccaatggcggtattgtttttaacttctaaagcactcaaacgaatacttctttgtttggaatccggaaaagatcctgtcagaacactcaaagcattttcctgaatcgcaatgttttgttccaatagcggaatcagttgcgcggcgtttaatttttgtgcttccgattgttgaatcgccaatgaagtgacctgaccggcatcgtattttaatttgataatagaggtggtactatcatttaattttagattttgtcgggcaatatccaactgtgcgtccagcattaaaagattgtaatatcccttagaaacattagcaacaatggtagtctgtaaagcttttttaacttcttctgactgcagataacccgcaaaagcttcttttttctggttctttatttttccccaaatatcggcttcccatgaaagtgtcgctccggctgtgaagtcattaatatgattctgacccaatgcctgacctaaattctttccggtaaaactattgtctgacggattgctggtgcttgccgctaccgataaattgacttcagggacatttccccatttggactgtgtgaatcggtaatgtgcaatctcgatatttttagtcgcaatttgcaggtcgttgtttcgggcaaccgcgctgtctattaattgaataacatctttttcggtaaagaagtttttccactccgtatctccaatactggccgtgtcttttgaaaccgatgcattcctgaaattttcaggaaatgcatcttttggagtttcaatatccttcgaaaccttacaggatattaacgttgtgatcaaaatggcgatcattacgattttggttatatgatttttcattttaggtgttgtcattaaatttctgtacaagtatcttttctgctttcaagatctcttgaaattttataggagatgtatccgatgccaatgataatggctacgagtacggttgtgatatagttttccatttttatttttcttcgttatgaattacggctaccggttttccggaaaccttttcttgtaaatattggaagatgacgaataataccgggatgataaacaatcctagaattacccctgaaatcatacctcctgcggcaccaatactaatcgaatggttaccttgtgctgatggtcctttggcactcatcattggaattaatcccacaacaaaagcgagtgacgtcatgataattggtcgcaaacgcagttttgcagcatctattgaggccatcaccaatgcctgaccggattttcttttctgaacggcaaactccacaatcagaatggcatttttagcgagcagtccgattaacattaccaaagcaacctgtacataaatgttgttttgaattccggtgaaaccaatagccacaaatactccaaaaatacctgcaggaatagaaaagattaccgccaaaggcaaaatgtaactttcgtactgtgcagcaagtaagaaatagatgaatatcaaacacagtaagaatatcgttgcggattgtcctcctgaagaaatctcttcacgggtttgtcccgaaaattcaaaactataacctgcaggtaaatgttgtgcagcaacttcttctatggctttaatggcatcccccgaactaaatccaggtttcggaatggcatttatcgaaatcgaattaaacaaattatacctggaagctgtttcagaaccataaatacggcttagtttcaccaaagtatttattggaaccatttctccggttttgttttttacaaaaacacggtcaatagaagatgggtcagctctgtcggcaatatctgcctgaacaactactctgtaatatttaccaaatcggttaaagtcagaagcttgtgcgctaccaaaataagtctgcatcgtttgtaaaatgtcttttacatttacccccagctgattggctttttcgtcattaatatccagttgcaactgcggataatcggctttgaaactcgtaaaggccattgcaatctccggacgtttcattaattctccgataaagctttgagagacaccgctaaacttatccagtttacctccggttttatcctgtagcaccaaatccaaagcttcaacgttactaaatccgggaacagttgggaaactaaacacgaagaaacttccgcctgtaatggtccctaattttccttgcacatcggccattatttcgtcgattcctttgatttttccgcgctcttcatccggtttaagcaaaacaaaaataactgctgacgatggacttgtagaattcgttaataaattgaatcctgaaatcgctgttacaaatcgtgatgattcgtcgtttcttagtaaattctctgcctgtgtcattactttttgtgttccgtcaagagaagttcctgaaggagtatttaccgcaatcgcaataaatccctgatcttccgttggaataaatcctgtaggagtcgtttttaccaacagaatggttgctgctgtaattaaggccagaccacctaagcttaaccatttgcggcgaattaaaaatttaataccacctacataacgattcgtcaaagattcgaagctgctgttgaatgcggtaaagaacttttctttaaatccttttttagcgaaagcttcattttcgtttccttgtgcaccgtgattatcttttaagaataaggcagcaagcgccgggcttaaagtcaaggcattcacagccgaaattacaattgcaatcgccatcgtaaaggcaaactgacgatagaaaactcccgtagagccttccataaaaccaaccggcaggaatacagcagccattaccagcgtaatcgagataatagcacccgttatttcgtgcattgcttcatgtgtggctacttttggagacaaatgtttgtgctccattttggcatgcacggcttcgacgactacaatcgcgtcatctaccacaataccaatcgccagaattaaagcgaaaagtgttagaagattgatcgaaaatccgaataactgcatgaagaagaacgttcctaaaattgctacaggtacagcaatagccgggattaatgttgatctaaaatcttgcaggaatataaatacaacaataaatactaatataaatgcttcgattaaagtatgttctacctgttctatcgattgatccagcgatactttggtactatagaaaatattttgtttgatcccttttggaaaatctttagatgctttttccatcagtttgttaatcgcgatctgaatgtcattggagttagaacccgccaattgaataataccgattacaactccttttttaccattcaaacgcgttaaactgttgtacgaataagcgccaagttccactcttgcaacgtcttttaagcgaagtaccgaaccatctgcattagagcgaatagcaatattttcatattcttccggtttggttagttttcctttgtatttgattacgtattcgaaaacttctgtacttctttccccaaatttacccggagcagcttccaaacttttgtcctgaatagcactcatgatttcgtttggcgtcactttgtaagttgacatttgtgtcggattcagccaaacacgcatcgagtaatcttttacacctccaaaaatactggccgatcctactcccggaatacgtttaatttcaggaataatattgatttgggcataattggccacaaacgtctgatcgtatttcgattcatcctcggtgtacataccgatggccataatgaaactgttttgttgtttcgcagtgatcaccccttgctgtaccacttcggcaggcaattgactggtcgcctgtgccaccctgttttgtacatttacggctgcctgatcggcatcggtacctaatttaaagaaaacagtaatggctaacgatccgtcgttactggccgtagagctcatgtaagtcatgttctcaaccccatttatagattcttctaaagagggcgctaccgaacgtaaaaccgtttcggcattagctcccggataaaccgccgttaccaaaaccgatggcggtgcaatatcaggaaactgttgtaaaggcaatttcgtaagtccaagtacccccaggatcaccaataaaatggagattacggttgccagtacaggtctttgtataaatattttgaacatttgcgtgtaaattattttttagtgattacttgggcaacttttgtagccggtttttcaggctgaatgacctgaccttcctgaagtttatcgataccgcttaatacaatctgatcacctgatttgataccatctttaattaaatagtttgtaccgcttttaccaataaccgtgatcggcattttgttgactttattttctttgttaacggtgaaaacaaaaactttgtcctgcatttcaacagtagccgattgtggtaccaaaagagcatcgtcatggtgaagtcctaatcgaatttttccggtgtttcctgagcgtaaagaccctccagcattgggaaaagtagctcttaacgtaatagctcccgtggttttatcaaactgaccgtctaccatatcgatttttccggtttgaggatacgcattattatcggctaaaatcaaagttacaggaggcaactttttgattttatcacccaggctgctgccggcatattgtgctttaaagttgataaaatcggtttctcccaaagagaaataagcaaaaacttcatgcacatcagataagttggttaaaggttcaacatccgttgccgaaactaaacttccttgttttttaggtaatcttccaatgtagccgcttacaggagctgtaacattagtatatccaagattaattctggccgatcctaccattgctttagcctgttcgatattggcagcagcaattttttgagaagccttggccgtttttaactgataatccgaaactactttgttttgaactaatggagtcaatttatctacttccaattgtgcgttgattaaagccgcttcagcagcgtgcaaattagccagcgcattgtttaattgttcacggaagggacgttcgtttattttgaataaagtctgacctttattgacataagcaccttcgtctacaaaaactctttccagatttccgcttacctgagggcgaatttcaacatcaacagtaccttgtatagaggcaggatattcggcgtctgtagtagtgttttcgcttgtaatagcggcaacaggtaataatggtgcagcgggagctgccggggcttgcgatttatctgcacaactgcttagtacgagtgccagaataaaactggttatgataacatttttcattttattattggttttaaattgttgaacattcttttggattaattgatgtggtattctggcattccgggaattcatatttaattatattaaattatctaacgtctacttattaagaaaatagaaacaattatatatttaaaaaatagaataaagtaaggtttttgtataaaacacatttattctaaaaaaacgatcccccaaatctcttttaaatatctgttgtgttatggttactattgatagagaagtattctgctttgttgttttttaaacaaagaaagagtatcttagaggaataagatctgttatcagtattaaaaacagaattagtatttgctaatttttgctatagaacaatatttattcaaaatgtagtacatcattcaggatgttctttcgatacctaattaaaaaagtggcatgagttattgatttgattctgtgactcattattttatttatcattttaaaatataaattttgattagaaaacattccttaaatagtacttttagtttttttaaactaaagttcaaacacagaaagataattcactacactttaatagcctgtgttattcttttacaaataattgcaatagttatttggtacaacgaatcgtctaatgaaacagaaatgtcgaagactttaaactcgatggattcattgaacagaataacgcatttcaccagcggtataaataattcatttgttgattctcaaaagagctttaataattatacctattataaagataaagaatcacggaataagtatactgcttctttaaatgagatcagccgtctgatcgacagcttaagcttaattaccagagataataaggcattcatgaagattctggaagaaaagaatcagtcagagcattctgtagaggctataaaatccagtatagattctattattgagtcgcagattaattccgataaaaccgttttgtcaaagccttttaaattaaacaagtttgagtataaaaagatcttagacagcattaaaacggactcttatatgaccgtagacagtgtatctaaaaaaggtttattctcaagattgggagctgctttggccggaaaagtcgatgtgcaaaaagagaagctgaatattacggttacgatgaaatacgataacaaagtagttaccggaagtatcgaagaacagtttgcgaacctgtttaataccaccaataaattttacgaagagcagtttaagaacttaaagaagtcatttgctaatttaaaagatcaggatgctaaactaaaagaattcaataacgaattactgaatttagagtcggcgattatgccgaattacaataattcattgaaattgcttcaggacaatactcagaaacaattgcaaaagcagtacgaatccaataaaatagcgagaagttataccattgggattttgatactgatgatgtttatcgtttcgcttgtgcttttcggcttcacgagactggctttccaatacgaaaaaagactgactactgctcagatgcagatccgtgaaaacctgaattttaagaacagaattatgggaatgatcagtcatgaaataagatcgcctttaagtattatttctatttacagtaagatgattagtgcttctataaaagatgccgaaataaaagatacttttaaatcaattcagtttactacaaactcattgcttcttttggccaatcagattctggagtattcgaaagacggaaattatgagcccaaattgaacaataagaagttcctgcttaaggaagaaattcatcagattgttcattcgatggcttcattggttgaaagtaaaggaaataagattgaagttaattctaatctgatttcaaatcttgaagtgaattctgatgcagcaaaaattcatcagcttttttataacattattgggaatgcgaataagtttaccgaaaatggattgataaaaattgcgatggatctcgagaagacctctgataagcaagtaaatttaaaaatagaaattgaagacagtggaattggaattgccaagaatgacctgaaaaacatattcgaactttattatcagggtaccgtttcaggaaaagtaaacgatcttggagtaggtttggggctcaatttgtgtaaagaaattgtagaattgtttgatgggaaaatagatgttcagagcgaagaaggcaaagggacaacgattattttcaacctcttcataagtttagtttaaaataagaccaaattaatatactttttgtatattgacagtaaaaaggcaattagttagagaaaagcgctgaaacaaccctaaattaggtaaatgaaaatgaaatccccatccaataactatagctttttagtagctgatgaccatagtgtggttcgacaaggcgtttctttgatgataaaagagttattttcgaatgctttaattcataaagccggaaattttaaggatacccttactattttaaaagaacagagtatagatttattaatcttagatgtaaattttcctgacggaaacagtatcagtatcataacagagattaaatccatccagcccgaagtgaaaatactgatcttctccgcttatgatgagaatatttatgcaatgcggtatttgaatgcgggagcatccggatacctgaacaaagaaacttcggaggaagaaatgaaaaacgcaatcagttcgatgattttgtccggaaagtatattacacagaatcttaaagacaggattctggactcttatatttcaaaaaaaccaacaaatccattagatgtattgtctaacagagaaattgaagtggcacagcttttaattaaaggctatggcaacctcgaaataattgaacacctgaacattaagaaaacaacggtaagcacctataaaaacaggatttttgaaaagcttgaaattgataatctggccgatttgatcaaagtttttcatttgtatgcggactgataaacggcgtgtttcaaacatactttaaaaaacaggactttttaagtgcctgttttttttgtgattattattttttttgtgatgttttttctgtagaaataattctacaacaaggtgttccatgttctataacgtattgattttattgcatgtatttttgttttgtcaggaagacgcagttgctggaactttataaataagatggatttgtagcagaatggattattttttttcagcatctagcttcctgtattaaaagacactcttttgttgttacggacggctttttttgtttttgcttttgttttttgggttataaaagtcaggtcaatttttatttttttagaagatcgccgtctgatcaacaaatagtgcttttaaaatctgatgcaaattttaatgctaaagaaaactacagttaatagaaagggaatgtataaaagtaagactatggaattcgatttttataatacaaagaagaaagcaaatgtgaatgtttttaaatctaaagcatttgatgaggttcaggacgctcttttcgtatttacgatttcggcagataacgattatgagatgccctttataaatgacgccacttatgaaatgtttgaagttttatccaataagatgtttactaataccgtactttctatatacgatcgaattcatcaggatgataaaaaaagggtgaaaaactctttattcgacgctattaaaaaaagaagaaaatggagtgttgtgttcagggcagaattgcctttcaacggattaagttggtttaaggtgacttcaaaaaggctagtcaataaagatggaagtacggaattttatggccgtataactgatattaccgaattaaaggagcaggagttaaaactcagaagaacggaacaacgttttaagttcatgctgatgacttcaaatgaaggtatttgggattgggatctaaccaatgatcgaatttattattcgccgcaagccttaaatatactggaattgaaagcgtctgatattgctcacacttgcgacggatggaagaaaatgatacatccggaggatgttgaagattgtcaaaaggcatttaatgatcattttgataacagaactcctttttacgaaaattttcaacgtgtattaacttcaaataaaaaatacaaatggattctcagtaaaggaatggtgaccgagcgtgatcttgagggaaaaccattaaaggtaataggaacttacagcgatgtttcttttcaaaaagaaaaagagcttgagttaagaagagaaatggaagtgtataaagaaaagaacaacagattgttgaatttttcgcacatcgtttctcataacctaaactcgcacgcaggtaattttaaagttcttttggacttgatcgattcagaagaaggttttgatgaaaaagttgaaacattaaaatacctgcgtgcggtttccggcgatcttagtaaaacaattgaagatttgtcgcaaattgtaaatgttcagaacaatgccgaaattaatatcgaggcactgaatttaaacagttatttaaatagggtactcaatattgttaatgcttataacaacaagagtaatgttacgataatcaacaacgtttcccctgaagcagtggttcattttaatccggcatatcttgaaagtgtattgcaaaatttaagtagcaatgctataaaatatgcagatcctaaaaaaccactgatcgtcgaatttaattttttcagagaaaatggaagaaaggtattcaccataaaagataatggtttgggaattgatcttaagaaacacggagatttaatttttggaatgtataaaacatttcacaaacacgaaaaagcaaacggtttgggcttatacattacaaaaaatcagatcgaatctatgaatggaaacattacagtagaaagtcaggtaggagagggtacaacttttaaagtcttttttaaagaataagggtgctgcgttccgcattatatatagaatttcagattacataaataattatttttagaatggaaaaatttatcgttattaaaaaagccaatggagaatttcaattcgaatttgtaaataaaaatggtgaaattattttaagcagtggcgattatacccgaaaattcatgtgtatgaaagggattgaatcggtaaaagttaattcacaggacaatacaaaattcttccggaaaaccaattcaaaagatgaaagatactttaatcttaaagcttttaacggaaagattatcggaacaagtaaaatatttaaagacagagattcccgcgatgaaggaatactggaatttagaaaatatgcaccacatgctattgtagaagatcactctaatacagtattggctgagagtgcagcattttagagttattcaataaaaccgtctgccattcggtttgattttataaaacaatgaacttttgtcgttttccggattgtaataacggaatcgttttttagataatttaattggtattttacacagctaagaccgcttttgcggtcttttttgttttcagtaaactcaagttataaggcaattataggttacgtcttgaaagggcaaaagccaggtcgaaaatatagtcatcccacatattttgtgtaagattctctaaaaatgcgaacgtttttgtattggaatttgttgggaactaaaattgcttttgccctttcagggcaatgctgtatcttgatctaacacatagtactttgtactatgctgttgcttttcgggctttcagccctttctggttagatttgctctgaaagagctttagcattagcatggtgtgcagcattacgaatgataagggcaattataggttacgctctgaaagggcaaaagccaggtcgaaaagagagacatcccatatattttgtgtaagattctctaaaaatgcgaacgtttttgtattggaatttgttgggaactaaaattgcttttgccctttcagggcaatgttgtatcttgatctaacacatagtactttgtactatgctgttgcttttcgggctttcagccctttctggttagatttgctctgaaagagctttagcattagcatggtgtacagcattatgaatgataagggcaattatagtttacgctctgaaagggcaaaagccaggtcgaaaatatagtcatcccacatattttgtgtaagattctctaaaaatgcgaacgtttttgtattggaatttgttgggaactaaaattgcttttgccctttcagggcaatgctgtatcttgatctaacacatagtactttgtactatgctgttgcttttcgggctttcagcccttttttctgcaacttctgttcttgatctgctataagccgaaaaacatttgtgtcttttgttacttgcccgttttattttaattcttttttttgtaaaaaaggaggttaatattttacaaatagtaaaaaaatgactttacaaggaagttgcgcttaatcaagacttaacttcggctccctgcagtattttatctgccactttccttgaatttcctcactttaaagatgtaaatccgccactattctgccaatatttcaaggattataaaactatttttttacaaatacttaacaaattacaccccttaattttcttttctttaacaattagataatttttgattatttactatttataaaattcattgtttatttgcttgtataaatttaatatttgtaaacaaattaaccatgaaaacaatttacaaggcaattttaattttttcggttgcactttttactccaaacataatggctcaaaaggcaagcatcagcggaacaattaccgacacacagtctccgcttccgggtgctaccataatattgtctaataatctaaaagctacaacagattttagcggctattttaccattcaggatgtcagaccaggcagcttcgaattagaaatctcttatatcggatatgaagtgaaacacatacagattgaaattactgacaatcaaaaactgaatttaggtacaattcagctgcaaaccaactcaaaagaacttaatgaagttgtggttagtggaatgacccaaagaaatagtgaggcgagagcattgaacatgcagaaaaaatcaatgagtattgtaaatgtaattgcagccgacgggattggaaaacttccggatcgtaatgctgccgaaaccgtacagcgtatgccgggagtttcgatagagcgcgatcagggggaaggacgttttgtatcggtgagaggattgccgccattttggtcgtcaactacaattaacggaaacagaattccaactgccgaagaagaaaccacttcgagagctaccgcatttgatttttttccttcagatcttatcgcctacgttgaagctactaaagcgcttacaccggacatggatggtgatgcgattggcggaagcgtcaattttactacacaaaccgctccaacgaaaagaacaattaaagcaagtgtttttagcggatacaatcaaaaatcggataaaggaatttatagtggatcacttacaataggggacaaaagtaaagatggaaagtttggatacattatcaatggtacgtattgggacagaaactgggcaaccgataattacgaggcgagaagacaaggtgatcagggcgtttacagattggagttgagagattacaccggagttagaaaaaccacaggtttgaatggtgcaatggagtttaatccttcatctagagataaaatttttctaaaagtaacttatggcggacttacagatgaagaaacacattacaaacaccgtatccgatttgataaattcaatggtacaacaaatgcattaacggtggaacaacaagatattcacaaccaattaatgacacaatttttaggtcttgatttgggagggaaacatcagttagcgaacggaaaattagattggagtcttgcttcttatcgaaacaggtttaagtatggcaacatcccaaatgcagaagacaacagttattttttaattcagttcaatcaaacgggagtaggtgttaaacccgaatatttaaaaacagtgccgcttgccaatggtggagcaggaggtccaagagcgtattgggctgctgatggtggaattatggatccaagcaatccaaagtcaatatttgatttttattccgatccaaatttcaaaacagatccgacaaaaatgaagttttctactttagaattatacaaaatcaacatcgtagaaagagacaacattattgcggcagtcaactacgagcacaattttaatgagaatcttaaaatgaagtttggagcgaaagtaacagataaagatcgtattgcaacttttagagacgagtattacaactggacaggttctccaaccccttatttatccaactatgcttctgatttaattcttcaaccgggaggtacagattacttaaggaaagaaacaggcactttgattggaaatagtttcggtccggttttatcagcggatggaatgacaaaattattcaatacctccaaagcaaatctggttttaaatcctgctgattcgcagattccggaactgggtaaaggattaggaagaaactttaatgtaggggagacaacctcttctgtttatgcgatgtcaacctataatctgtcggataaatggactgttttgggaggtctgcgtgtaaccaatactatcacacaggtaaccggtaaaactgtagaaaacaatgtggtggtagatgctgagaatactaaaacgtatacctccgtacttccaatgttgcacgtaaagtacactccgattgagaatttgaaccttcgttttgccacaaccaggacatttgcaagacctaattttggagatatttcacctgcaggttcgctaaatactattgacggagagtatgcaggaggaaatccaaacttgaaccctacctattcctggaactttgatttgttgggagagtatttccttgacgaagtaggaatcattaatgccggagtattctacaaatcgattacagatccaatttttgacgatacttatcagggtaccataaacggaattccggatatagaaatcagttcacctgctaacggaggaaatgcatggattggtggagttgaatttggaattaccaagagatttagcttcttgccgggattcctgaaatattttggaactcagatcaatgcaactcttatggactctgaaatgacgttagggaaaaatgctaacaatcctaacggaagaaaagtgtcaacaccttatcaggcaaaagaattatacaatatacaactgttttatgagagcggcaaactaaatgtgagagctgcctttaatcacaagggagcttatgccacaagttttgatgccaatgctaaaaatacagacatgaatgatatttattacggtaaatacaactcgcttgatttttctgcttcctataaaattggagatcattttaccattttcagtgatgtaaacaatgtattgaacgagcctttgatgtaccattttggagaaacaccaaaccgtccgaaacaagtagaatattatggattaaagtttaaccttggtttaaaatataatttatagacaaccttaagttaacccgttggatgtgggcagattttatttttacagtttattttttttttaatctgctgcaatcaacgggtttctaaaacaaccgtacttatttcacattgatcacaacctcttcacgttaaaacttaagaactaatgtctaaaaaagcgtctaattttaggttcatactcaaaacgtccatagcggcattcggtacttatttttgtatgtatgccttcagaaaaccttttacggtcgccactttcgatcagttgtctttttggggaatagattataaaattctgctcattttagcgcaggttttaggctatactttttctaaatttttaggaatcaaaatcatatccgaattaaagtcggccaggagaattttatatttaatcagttttatcgccatttcagaattggctttgctgggttttgctttggtaccggcaccttacaacattctatttttattcatcaatggattgcctttaggaatgatttggggaatcgttttctcttatatcgaaggccggaaaacaactgaattactgggggtaattttatgctcgagttttatcgtttcctcaggagcggcaaaatctgtgggagtatttgttctgaaggttttgggatgcaatgagttttggatgccttttgtttcgggattgctttttattgttccgctaatcgtattttcattgtttttggaaaaaatcccaaatccggatgacgaagatttagcgttgcgatccaaacgaagacctttagataaaaaagaacgtgcatcattattccgacaatttgcttttccgttgaccatactgatcattttctatgccatgttaacggcaatgcgtgaattcagagataattttgcaagagaattatgggattctttgggatacaaagagagtatttcgatttatatgtactccgaaattccgattgcgatagctgttttggtcattttaggatttttaggaagtatgaaaaacaactacaaagccttcaaaaattatcatttggtgttgctcgtaggttctgtacttatagggattacaaccttattgtttcaaaaacatttaatatcaccagttccatggatgataatttccggatttggaatgtacgtttgctacattccgttcaacggtctgttttttgaccgtatgattgccacctataaaattgatggaaataccggatttttaatttacatcgcagatgcttttggttacttaggaagcgtactggtattgttttttaaaaattttggcgacaagaatatttccctgttaagcttttttaccacctgtatttatctgctctcttttgttgggatcatcactaccatcatgtcctttaactattttaaaaggaagtttagaaaaactgctaagattcatacggctatgagttatgagatgtgagttatgagatgtgagatgcaagatttgagatttgagacgccgagggaaacttgaaacctgaaacttgaaacctgaaacttgaaacttgaaacttgaaacctgaaacttgaaacttgaaacttgaaacctgaaacttgaaacctgaaacttgaaacttgaaacttgaaacttgaaacttgaaacttgaaacctgaaacttgaaacctgaaacttgaaacctgaaacctgaaacaacaaaccaaaaacaaataaacagtaaaacagtaaaacacataaaaacacaaacatgaaagagaagtatgatttaataattgtcgggtcgggagttctgggcacatttcacgcctaccatgccctgaaaaaaggaatgtcggttgccattctggaaaaaaacagtaaaccggaaggcgcgaccgttagaaattttggacaggttgtaccgtctggaatggatcgaaaatggcagaattttggaaaagaaagtttaaagatttataaagatattcaatcgcagtttgagatcaatcttcgtcagaacggaactgtttatctggcttcaaatgaagaagaattgcaattgattgaagagctccatcagattaatatttcgaatgattacgaatctaatttgctaaccaaagagcaatgcctgaataaatacgacggtttacgtgctgactattgtaaaggaggattgttttttccgcaggaagttaccgttgaaccttctacaatgattcacaaattgcaccagtttatgacagccaatcttggacttgatttgtttgtaaacactacggtcgtagaaacccaggacctaaacgatgaagtaatagcaagaactgcagcaggtgaggtatacaaagcttcaaaaattattatttgtaacggaagtgatttcaaaatattatatcctgagatttacaacaacagcgatctgattgtttctaaattgcagatgctgcagacgaaacctcagaacaattacagattggacggctctattttaacgggattgaccatcagaagatatgaatcgtttgaagaatgtaaatcgtatcagaccatcaaagcaaaagaaaatccggatagttttgagaagaagtatggcgttcatatcctgttcaagcaagcccttgacggctccgtaattttaggagattctcatgagtatgctcccgcaaaagatattgattctttgggatttgatctgaatatggacatcgatcattttatgattgaagaagccaaaaagataatcgatttgcctacttatgaaatccagaacagatggtttggaatgtactcgcaatgcaagaccaaagatattttcgaatacactgttgaccagaatattcacatcataaccggaataggaggaaagggcatgacgggaagcgcaggatttgccaaacacaatattgatatgatttttaatgcttagggattgtgagatgtgggttatgagttatgagttatgagttatgagttttggataaaacctgaaacctgaaacctgaaacaaatataattttaaatcatagtatataatctataattaaagtcttttttagagaaataacacaaacgatcaaccattaaccatcaactataaactaaaaaaaacagcctgtttggctattaaaataaatacacaaaatgaaaattaatgaaattgaaatggttgtttttgatatggccggaacaacaataaatgagcaaaatatagtttacaaaacattgcataaatccatcaacaacttcgggatcggggtttctttggaatcggtattgtcattaggagcgggaaaagaaaaacatcaggcgatcagggatattttagaatacaataacatcacagacgagaataaatcagatgtaatattcgaatattttaaagaaacactggacaaagaatatctttcagcttccgttttacctatagaaggcattgaaaatatttttgaaaatttaaaaaaggacggtgtaaaagtggtactaaacacaggctacagcagtcacgttgcgaataccttattagaaaagctgaactggaaggaaggaaaccaatacgatgccttaatcaccgctgatgatgtagtgttgggacgtccatttccggatatgatatacaaagccatgcaattgtttgcgattacagatgcttcaaaagttctaaaagcaggagattctgcgatagatattgaagaaggtaaaaatgccaaatgtggcgtaactattggtgttttatccggcgcacaaaccagacagcagcttgaagcagcccagcccgattacatattaaattcgttggcatcgctttatagtgttatggggtgagcggttagatgtgaataatgttagaagtaagaagcaagaagtgagaagtaacaattaacaattaacaattaacaattaacaatatattttgtgaatatcttattctttcacgtattctaggttttaatgttaattcccagtcgctactatcacgtacattataatttttatcgtgagaatcagtgaaaggaaaagtagattcattgcccttccatgctcggagtaaattataatatataaaatcttttgttgcatgtgcagaaagactactttcgctaaatggttcacttacataaaaggctgaataatttccatttctagtcggcatatttttttttttaggtttgtaataattgtttggttcgcagttatgttgagattaaatatttagcatatctaatcaaaaaaatgtaatatttttttcaaaaatatcaatttacataattgaacaaccacgtatttctacctgtttatcaaacaaaaaaggacagctcccaaattaatgagagctgtcctaaagcaaatttctaattttgcactcctaaaaatgcgtacagtttttgttaatctactaaaaaagaaggagaaacacaggttattcgtttataacatcaccatctttagtttcttcgctggcgatttttaccagtttatctttcaggtttaaatctccgaagacttccactttgtcgtcgatttctcttccttttttaacgtcaacgcgggtggccttgtggtttaggactttaatgacaaacaaaccttcggctgaatttaccaatgccgatttcggaattacaaacgtgctgtctttcgcgttaagcggtaataaaacttctgctaccattccgggtaatagattggtttgggtgttgtgaacgtccatttcgactctttcagaacgcagttttaagtctaaagcgccggacattctggtgattttagcggtaaaagtgtccggaagcgattttacattaaagctcatttcgtcgccattgtgtaaatatccggtgtacaattctggtaccgaaacggccaaacgcaatttatcctgttgctgaatggtcaacaaaggcaaatcggaaccttttcctgcgggacctacaaaggttcctaaattgacatttctggcggctaccactccgtcaaaaggagcacggatttctaagtaccctctcataatcgagatttctttgtgtgccgcgatggctgcctgatattgtgcgtagtctgagtttttctttccgctggccatttctaagtcgtttttagaaatggttccttcaactttgctcgtttcgtacaaacggttgtaagtgcttttgctggtcgcgtaaatggcttccatcgattttaatctcgattcggcagcagccaattgcgaactgatctccggtgcttcaagaacaattaacaattgtcctttttttactttcgaaccaatatctactttcagcaattttacaaaactgctcactttggcatacaaatcgacttgttgaaaaccggttaattctgccggtaagcgcaattctgtagtcagtttttctttggccaaaaggaaagtttcgactttaggttcgatttccgctttaggcgcttcttcttttttcttttcacagcttagtacaactaaagctgtaaatagtatcgctgtagattttataatgttatttttcattttttggttttatatatgtttttataagtattcagaaagtataaaagtttatcgaagtgttttcgcgacgatcgtaactttcgactttatgactttcggctttatgactttatgactttccaactttagacttatttaaggatgagatataatggatactttcttcgtcttcaggatctaaagaaacggattgtgtcgatgttttttcctgtgcccatgcaaatatctgcggaaggatcaacaatacggcaaaagtagaaaataataatccgccgataaccgctcttcctaatggagaaacctgatcgcctccttcgccatgaccaatcgccatgggtaacattcccgcaatcatcgcaacagaagtcatgataatcggacgaagacgcagtgcagcggcttctctggcagattctaaggcattcccgtttatttttcgaagctgttcggcattggtcaccaataaaacggcattggcaatagaaactccgacagacatgatgattcccatataagattgtaaattaagtgttgaacctgtaaaggtcagcattaataaagcgcctaaaacaaccgccggaactgtggttaagatcaccagcgaaactttgaacgactgaaaattagcggccaacattaagaagattacaaaaacggcaaccaataatccggtctgtaaactgcttaatgtctcgctcaataccgtgcttagtccaattggagttataaataaaccacgaggcaattcgcctaatgaactaatggtcgatgcaacatcttttgtggccgtccccaaatcggtctggttgatgttggccgtaacggtaatgtatggcatggcccctaaattgtcattttcaccacttacaaagccgggtgtaattttggcaacgtcgcttaaaaccggacgaagcgagtttttcaataccggaatttctccaatatcggttttgcttttcattttattcaacggaacctgaacttgtacagaataggataatcctgctttttcgtcgacccagttgtttttttcagtataacgtgacgatgaagtcgatgctataagagaacgtgaaatatcattcatatcaacgcccaattcggctgcacgtgttctgtcaatattaatgttcatggccggatagtgtatcggctgaccaatttgtacgtctctgaaataagatatcgcgtttagtttgtttacaatctgagtggcatataattcatttcgttttttgtcttttccggcaattcgaatttcaattggagtaggagacccctgactcaatactttatcggtcaattcgataggttcaaaagaaagtttagtgtccggtaaaacttttttcagtcttgctcttaactcatctttaaactcatccatatcgacatgatactcttttaaacttacctgaaaaaccgcttcatgcgaacccgccataaagagataaatggggttaatcgagaacagggaagggtgttgcccgacataaacagaagaaattccgatatgctctttacctaccattttttccaattctttcagcacaattcgggcttgttcttcggttctttccaatcgcgttccgtcaacagcacgcattctcaattgaaactgacttgaatttgtttttgggaaaacatcttttccgataaaaccaattagaacaatagctaaaacagtcgctgaaactaaataaacaatcgatgttacttttttatgtacaaacaatcggtctaaagttcgcatgaaacgaattctgaaacgctcaaaaggacttatttttccgttattattagtatcttctctttctacatagctttttttctgagtgatcagattttgttctgattcgggagttaaaccgcagtcattaaattcggcttcgtcgtcggtaatttcagggccatgtggatgtttttcgtgtcctttcatcatccagttcgccattaccggcacaaaggtttgagacaataaaaacgaaataaccatagagaaaccaatcgctaaagctaaaggaagaaacaaggctccgggaattcccaccatggtaaatgccggtgcaaatacggctagtatacagagtaagattaataatttaggcaaagcaatttcctgacaggcatcccaaatggcgagtgccttgggttttcccatgtcgagatgctggtgaatgttttcgatggttaccgtactttcgtctaccagaattccaatggcaagcgctagtccgctcaaagacattaagttgatcgtttgtccgaataatttcaggaataaaactccggaaataatcgaaattggaatggtcataatgacgattaaagcagcacgacggtcgcccaggaaaagcattaccattaatcccgttaaaaccgcaccgataattccttcggtaatcaaacttttaacggagttgattacataaaccgactggtcaaattcgtaagataaattaacatcttcgggaagtgtactctgaattttaggaagttctttttttaatttctgaaccacatcccaggtcgaagcatctcccgcttttgcaatactgatataaaccgaacgttttccgtttaccaaagcgtaacccgctgtaatatcggcaccgtcttttacgcttgccacatcgcctaattttaagttttgaacaccgcctttgaataacggaatctgttcaaaatctttaacttctttaattgtattattggtaggcgtaatataatttttgtcgcccattctcacgtttccggaaggggccgtctgattgtttaaacgaatggcctcgacaatttgatcgggtgtcatattgtgcgaacgcaatagatccggatctacgttaacctcgatagttcttgggcttccgccaaaaggagccggagacaataaaccgggaattgaagtaaaagaagcacgaacataaacgttagctaaatcctgtaattcgttgttcgatctgatttttgaactcaaaaccaattgtccgattggcaatgatgaagcatcaaaacgtatgataaaaggaggttgtgttcccggaggaaaaaccgcctggattctgttggacagcgcgctcaattcggcagcggcctgcgccatattggttccttcataataggttaatttcataatcattaacccctgaatatttttggtttctaccgatttgataccattcgaaaaaggtaaaacgtttacgtagtttttagcaaaataagcttccatctggtcgggtgtgtaacctccaaacggatgcgcaatatagataaccggcaaattcattttcggtaaaatatcgaccttaatgtctctgatggcaccaattccgaagaaaaagagacccgcaaccaatacgagaatggagatgggcttgcggagtgcaaaacgtattaaattcattgggctttataattaaaattcatttataaataagtcaaaatttcctgttgcagcgactttcagtaggtacgactgccatacattattattgacaatatcacgatcgatttcggcacgatttaaaacgtacatggtctgcgttaaatcagtcaaatcagttaagccgtttttgtataaagtcgatttctgaagataagctcttttggcagcatctacctgaatgggtgcttcggcataattctctaaagtgattttgattttatcttcagcaaaattcaactgcgatttcagctcacgatcggcttggttgtattcttcctgtagtccctgagaaataaatttctgagcagtgacttgcttgtttgaacggaaaggagtcgttaaattccatgtaattccaattccaactaaataattggtacgatccggattgacaccatcccagtaatttcgggtaaaggcatgctgatttgtggcataactgctgtcaaatcctgaagctctggtttgcaatacaccaaaagcagtcatggttggataatagaatcttttgtacaatttgacttgctgatcgctgtaatcgatttttgttttatacaattgtaataaaggatgaagactgtctgtggcagtattttccttaatcagttcttttggaatttgagtgacaaaaagagaatcggttacaaaatcctgaggtgcaacgcccattagatcgaccaatttgttgttttgttctttcacaaaatttttggccagattcagcgcaattttagcttttgatacttcggcagtggctaaagtagaatcgactccggctaataatccgttcttcactcttgctacggctgtttttttgaaaacctgagcgcgatccagatttttttgctgtgaaatcaacaatctctgacttgcgagtaaattcagataagcggcagaaattttgatttcctgttgaaatttttcctgtttcagatccttttctttggcctgaacatcaattttagataaattgattttttcctgcgtttttccgaaagtgaaaaaatcccagttcatgttgaccagataaagtgcgccaaatgccgaattccagttttgttccggtaaaggaagtccggatgaagctactccaagacccccaaagccataaagaggcccattttgaccgtttacagttccgtaatcctgttgcgccgataagtttaggttgggcaggtaatcacgtttagactgcttaagactttcgcgtgatgcattggtgtaattgttttttgccttgatggaaccgtagttttccaaacctgtttttatggcttcttttaaagacagggtttgagcagaactaccacaggcaaaaatcaagaaaactaataaagtaatttttttgaaatacatataaactagtggtgtgaatttgatctctcaaaattatttcacttggtcggataaaagctttcttaaatgatgtaatgcgattataaatgaccaattcaattggtcatttattggaaataaaaattaaaaaaatgtagttaatttgtaaactatttaagttttaagaatgaagagagaaatggaaaacatattggatcacaaatggtggcaggaaattgccgttgttgctttttcatttactatttataccttaaaaaacgactggatgttgttcagttcgtttacctccatcttaatggggatctttttctatttaattttatacctgcacgcccagttcaaccgtttctttttgcttcccatactttttaaaaaacagcgtcccgtgacttatatttttctgacactggcgggagtattactcttttcggttgttttgtatgaggtgaccagtctggaaatgtttagtaactgccgtttgtatcaaaattctcatcagcgcagttatgtgtatcaactggccagtgttttagggactttggtttgtatactgagcccgataattgtttttaagttttacagaattcacaagagacagaccgatgagactcttttgttcaatcaaatgcaattgaattcattgaagggacaattgaatccacactttttattcaatacctttaatacgctttacggaattagtctcgagtttccggaccgaacatctgatttaatcatgaaagtatcgcagttgatgcgttatcagcttgaaagcaataacaaacaatgcgtgtctctggaagacgaactcgagtttataaacagttatgttcagctggagaaagaaagggtagggtatcgttgtgagattacgtacgactgtaaaatcgataatgaaaatgcctataaagtatcacccatgctgctgattgcgtttatcgaaaatgcattcaaacacggaacctgtgcgatagaaaaatgttttgtgagaatcattattacggtcgagaacgggttgcttcatttgcatgtagtaaattccattccaaagaaaaaaacggatgttatttcgactaagattggtttaaaaaataccatagaacgattgaatctgatttatgggaaagcctataaactagacattcaggacgataagaatacttacattgtagatttgaaactgcaattgaaaaagtttgtagaatgagagaacctaaaaaatgtataattgtcgatgatgaaccggcagcgcattatgtgctggcgaattacatcaagcaaaatccgcaattagaattggtttttcagggctttaacggtattgaggcaatggattatttaagagaccatcctgttgatttgatgtttctggacatcaatatgccggagatatcagggatggaattactgaagattattcccacacatcccagtacaattttaacgaccgcttattctgagtatgcccttgaaagttacgattacggtgttatagattatcttctcaagcctatttattttccaagattcctcaaagctatcgatcgtttttttgccacggagaacggtaaagtgaaaactgaagatgcagtaatcaattccgttacagtgaaggttgacggttactttattgagatagaattggaccagcttttgtttgcacagagttttgggaattatgtgaagttacataccataaaaagaacgtatctggcttctatcaccaccagtgaattggagaaatgcctgcccgagaagaatttcatgcgcattcacaagtcctatatcgtagcactggataaaattgagaccaccgataaagattttgtggtcattaaaaacgaaaaattacccattggtattacctataaaagagaattatcagatcgattgaaaaaatgataccgatgtaacattagactgaaatagacgtaaaattgataaaaaaaacagaaatgaagggagcttactaattcaattatttcaaagaagaagcctgctcaggagtaattccggcaggcttttttgattctattccaattttaggttttattaattgcacaagttgaatgattttcaaagtaatagcttctactgaaaaggattaaaaaaaaaatctgcaaaatctgctagatctgcgtgtgaaaaaaaacaaattcccgcagatctggcagattttttaatcgatttaatccttttaatctgtggctattatttttcaacacttagaatctttgtgtttaaattaattgcattattaaggttgattataccaactgctgtttccagaccggcaattttacccctttaaaaaccagccataaactaagagacaattcggcaattaaacaaggcatcaataaaattatacttgaaagtttcgggatcagaattaagaagaaactattggtaagataacaaactcccgccaggctcattaaaagtccaatagtctttggtagataacccgatttaaagatcagatagccctccagtaaacaaacaaatccaaaaaagatcaatccgattccgaaaccaaaatcgtgcaatttgatcgaaagataagataaggtgtgtaactgctctggactgaaagattttaaatattgggcatcacccagaaaaaataaggctgccaaaagattcagtttattggccactaaaacggcagtctggattaaattgaacgatagatttaaaagagcaagttttcggtttaccggttttaaaagataatagagaataatcatgaccggcagatcgcagatttgcataataagatccgctgtaatgccaattttccacagaaattgcgaatgcataatattttgagcagtggcagtggcatctccggacacaaacaatttgtttctgacaaatgtttctgcgaagaatcccatgacgataatgaccaaatataatatcccggctatgcgtgcataaagctgtggtgaagcttcaaaatttttcaggttagatttcattttttaggttttggtttttcgtaagacgtctgacacagaacattgttaccgactattttaacatttttttacaatatcattttttcttcagaataaagtagtaattttaatacgttattaagagatgttaatttaaaattgggcacatgaaaaaaatattcctgatgataacctttttgtatagcagttttttaatagggcagagtggagtttctcctgacaaagtggtcacaccccctgaaaaagtagtttttacttttcagaaagaatatcccggtaaagttccggtctggatattgaaatatgttggagatgacgacgatgaaattcggtatgaagctaagtttaaaacagataaaaacactagtgcattggcggtttatgataatttgggagttctcaaagcttttgaattacagattccattcagtcagctgccacaaaaagcacaaacctatctgaagaaaaattatcctgccagtgccattaaagaatcggcagtagtggtagacgataaaaacaaaaccacttacgaagttgggatacaaaaaaacgccaaattctatgacattgtttttgataaaaacggaggttttgatgtaatcatcgagaaagattaaaacagaattcttactaattcaatatactcagaattataaacccgacaggtttttgaaacctgtcgggtttaattatagattcacaaaataaaaattacaaattcattccgcctgaaacctcaatgcgttgtgcatttacccagcgtgcctcttcggtacataaaaaggcaacttcaagtttcaagtttcaagtttgaagtttcaggtttcaagtttcaggttttaggtttcaggttttaggtttttagtttcaagtttcaggttttctactcttcacatctcacatcttgcatcttgcatctcacatcttgcatctcacatctcacaattaacatttaaaacaaagttccctgtataagttccggctgcggattactgccaaaaggaaaagaatcaatgacaaaaaactgtttttttatgggatctaattcacggagaataatttctttacaggaaaaattcattgcaatagtggtaaagagctgtgatgcgactttaagattttcagcagttagttttctgccgatagaaatatgcggatcactgctttttttaaggttggaaagtagtaacgctttctgtgtctttttcatgacaggctgtaaactcttttttgattcttcacttggagcaatgaaaaaagcaccgctttcgtacgaaccaaaatcatccaaatgtacctgaaacggagtaaaggtatcacaaacattaaagagcttttgcttgaatttatccagttgagaatcgtcagttgtaaactcgcaaatcgtaatatgtgccaccgaatttttactgttgaaccagccaattttagtcgccagaagttctttcatggttttgatggcctcaattatttctggtgaaggatgaatgacaactgaatatttcttttccattttaacgttcgatttttggcaaatttaaagaatttgttggcatctaaatctttcctttcagatgcaatcgatattcaatttctgattttaataaaccgcttcctcctccaaaatgttcaattacttcaacatcaggctgctgttttaaacaaaaagaagtaaactctttttcgatatgatcttcgatccccgaactcaaaaggacaatatctattttgtggttcagaaaataatcctgagccagtttttcgtcattaaaaccaactgcattccagttttcgtaagcatttactaatcggagcaaaatctcaagaatggcttggttctttccaagcagtaagaattcgtatgttttcatagataatagtttttagaattctttctaagatgctaaggtgctgcgctactaaggttctaagattccataagtttagtaactttaggccttaatagcttagaaaaaaagtctgtattttacaaatgtactagtaaagagcttgttgtaacttaatctagaataagaaaacttcgaaaatttgtaaaaccttagcaccttcgtgtcttagtatctaagcaccttagtttcttagtcccttaaaaaaaaaaaacaaaagattttacagctgtagtgcttcagatagtcagtgacttagcgtttttgggaggaaaaagtttttcataatgcggaaagccgtaatgatttctctaaagttgcttgtaatttcgcgccataataacgggtaattatgctgtgtttacctttttagaccgcataataggttgttataattaactgtttttggagaaacaatttttttaattacaatgaaaattagacttattcatttgatcgtggatataagctttgtatgaatttgcaggattacaaaagagtctgatttttatagggtttttagatttggttattgggttatccggatctaaagacccttttttttattcttcctactgctattataagtaaccattaattttaagccattcttcgcaatctcgggtccaaaatttacttgtactatttacgcccaacccaaaaccatgacctcctttttcataaagatgtaattcagctgaaaccccgtttcgtttaagcgccagataataattaatactgttctctggtaaaacggctttgtcgtctgtggcatgaatcaggaaagcgggaggagtttttgaagtaactttcttttcgttagaataaaaatcacgtacttcctgtgagggattattccccagtaaactactttgcgagcctttgtgtgtaatctcattttgcatggatattaccggataaattaaaagtgaaaaatccgggcgtgcacttgttttagattttgtatcgtaagttatctcgtcgtaatgtgttgccagggttgaggctaaatgacctccggctgagaagccaataatccctattttgttaacatctatgctgtactttgttgcattttgccttacatgacgtatagcttcctgtgcgtcctgtaatggtccgttttttttgtctttcatgattagatcactaggtaatcggtatttgacaacaaaagctgcaattcccaggctattgagccagttggcgactttggtaccttctttatcaatggctaaatgttggtatcctcctcccggaaaaataagaacagcagtttgattgggtttagtttgtttaggtaaaaaaacactcaatgttggaacggtaactaaacgtgtactctgcacttttccgtctacaaaagattcattttccttgtattccggagcttttatttcatcagggattgtattccagagcggtataatttcattttgtgcatgtatagtagtgtgcatgaaggtgaataaaaataaggttagaagtaattcttttacatttttcatgaattatagaagtgtttaaatgggttgaaaaagtatttcaaaacaaagttttttgggatctgttttacgcttttgtaaaaatgtaacaaatgacttttacttcacaaacctgaagattacagtgaattgatcaaaagtgaaagttttttggacaattttgatagataaaacggttaagtttgtaaaaatagcttttaacaaatatattacttaaaatgtaatttaaagtatttttttttgagcgatctgtttaatcctttctttcacatagtatattatgtgctttttaactagtgaaacgccttttttaagtctacaaaatctatgtttctatgtgttaaaacgcttccagccaacggattaattttaaattgaggcataacagcataacccatgtgagaccttcttttgatttttttaaagaaggctctcactaaccaaattataaaaagcagatgaataaaaagcaattattcttattacacttcgccggtggcagtatctactccttcgagtttctgagagcattatgcaccgattttgaaatgataccgctggaacttcccggaagaggaaaaagaatcaaagaaaaactattgacttcctatccggatgctattaaggacctgttctcacagataaccgataagcttaacgggagcccgtttatcgtttacgggcacagtttaggttcgtctctgggtttgggagtgaccgatttattagagaaaaacaacactccgccccaatgtttgatcgtaagcggtaatgccggacccggaattgcaacagaaaacaacagatctgagctggagcgtgacgatttcatcagcatgcttaccgaattgggtgggataccggatgagttattaaatagtaaagaactgctcgattttgtattaccaatacttaaggctgattttaaaatagtagaagaagatttttttattgaaaatgccattgtaaaagctccgattgtggccataatggggaactcagagaaatatgtagatcggataaacaattggagaaagcacacgttttccggttttaactcctacatactaaaaggaaaccatttttttatactcgaccatggtgataaattgaaagaaatttttgatattagttttaaggaatgtacaagtcttaattataataatgtacaatagcattgctaaaaaacaaaccaattatgaaaacaaccaaaaccctgattaccgctgttatgatactattaatttcaattggcagtagggcacaaaacaacaaaaaagagcagaccgaaaatcaattgacgattacaggaattaccggacaatctatcaaggaatctgctgatgtaaataatgtcgaaaagctaattgcagcaatcagcaatcaaatagtaaaagaaaagctggcaccggccaatacgaccagtttgtcttatatactcaacagcaaagagtttataataaacggagtgaagcagaagccggaagtacaattgagatataaaaataaatatatcggaaaccatgcgaaatggaatatttgtaaaaacttcaaggcaaaataaaattcatcatgagatgagttttcttctttagtatacatcctgcttttaccattcagagtgattatcctattcttgaaatattgcgatcccttaaatttcttaaattttatcaattcaaaagagcttgagtttacatcttgtatcccttacaggcaatcttattaaatacattaaaaaaataatgaagtataattatatgcatttaaaatatatcgctttactatgcgtgtttgtttttctgggcaattcagtatacggacaaagttcaaaagcaacgggtaacgaaatatacaaacaagtgtcagcagcatccatttcaggaaccattattgatgctgaaaataaagagcctgttatttttgcaaccattcttttgttgaacgaggagcaggaaacattagtaaaaagcgaattgtctgaaacaaaaggagaatttaattttagaaacctgaaaagcgggaactataaaattaaaattacccatgacgactacaaaacgtttagcacaggaattataaccattaaaacagacaatcaaaaagaagtactgccgatagaattgttcaaaatcacaaaaaaggaaagcttaaaagaagtcgtaatacttaaaaagaaaaagtttgtggagactaaaatcgatcgtaccattttaaatgttgacgctttagaatctaactcaggaattaccgctttagaattgttaaagaaagctcccggaatcagtataagcgatcagggagttgtaagtctgaatggaaaagcaaatgcgaccatttttatcgatgaccgtccaacctatctgtcaggcgcccaacttgaaagctatttaagcggattagcttcagataatatagacaaaattgaaatcatgaccaatccgcctgcgaaatatgaagcagcaggaaatggcggagtgataaacatcaaattaaaaaagagcaaaaaagaaggagaaaacggaagtgttattctgggcttaagacagcataaatttacagaatacaatgccacgtttgctttgaacaaaaaaaaggagaattacaatatctttctgaatggaaatgcaggttacaaaaaacgctttcaggatctttatatcaacagaaactataccgatacaggcagctacagcaaacaggaaaacaataatgtaggagatgctatagtaacgaatctaagatttggagcagactataatctgtcaaaaaatacggtgattggagtctctgcagatgcgtcaatctggaatggaaatgatcttgataacagtttgaattacctttataacagaaaccaaactacagattccattgtaaaaacattaggcagctcagatgctaaatcggtaaacagcggaataaatctgaacattaatcacaagcttaacgaaaaaagcgatgtgagtgccaatttagattacttactatacgattcttttccctatcaggaatttaaaaattcgatcatttttccggatgcaaacaaaaattattccgatatgctggtaggaggagcagcttctaaggttaatatttattcaggaaaagcagattattccaatcagctgaccaaaaaaacaaacctgcagaccggattcaaatacagtaatatcaagaccaacaataagagcgagtatttcgatatcgtaaatgatatttcgacgccaaatttaaatcagaataataaatttctatacaacgagaaaataacagctttatacgtgagctccaacacaactttagacagactttctgtacagttaggactccgctatgaaagtgtaaaaattgtcggagatcagttaggaaacgaaataaaaccgagaacaaaaaatacaactaagtacgacaatttatttccaaccttatacctgtcttataagctcgactctttagccaataacacagtaggaatcaattacggaaaaagaatcgacagaccattttatcaggatcttaaccctatggttattcaggttgataaattgacattttacaaaggaaatccctatctgcaaccttcaattacaaattctgttgaagcttcttacgcatacaaaagcttgttgaattttactcttgcctatagtaaaattgacgatcagatcatggagactatagaaattataaacaatgtctattacagtatgcccggaaacattggaaatactcaggtaaccaatctgagtcttagttccacatttaatattgcgccatggctaacttttaccggaaatgcacaagtatcgtataccgataccaaaagtgatttctttggaggtaaactgcatacatacggttataattttagaatcgatcccgtattgcaggtaaaactgaaaagagattacaatatagaactttttggacgctatgttgggaaagcttatgtagcacaatttacactggatccttattggtttcttgatgtgacaatcagcaaaaaactttcaaacagaagttctcttaaattaatagggatggatattttcagaacctatatcaccaaaggacaaattaataatctggtcaatgcaaatgccgacttcagaacattatggaatacgagacaggtcagactatcgtttacctataattttggggataagatgactactcaggagagagaaaataacagtatcgataccgaaaaaaacagaatcaagtaaatcataatcatctgtcttttctagttgctaattttgacttagcatctaaaaaaatagaatttaattttcaagttaatttcagaatccgaatttaaaaagggacaccatctctttaagactttatcaaccacaacaaaaacttttaagatgtttaaaatatcactaaaaaattcaattcttctggcagcctatgctttgccaaatacaattcttagtttcggaatagtgtacattataaacaacactttgtcaggcaacaagtcatttatgacggattataccggaatggttttttttgcaattgttgtatatacttatctgataaacatcatttttcagaaagggctcaatgagttttcctttaaaatgttatacgacaacgaaaaaacaatattctcaaaaatacttcaaacctcactgataaaattagaaaacttaggttctcagcgtttttttaccgttgttgaagatttacgggtatttggacttttaccttataccgtaacccataccgtaaattctgttttaatgttagtgctttgtttgatctatatgtttaccatctcggtaagttctgctcttattgtggtagtattgattatagccgttgccgcttcctattttgtagtaatcaactctatgtctaaaaaagtaaccagtctcagagaatacaatgacgattattataagtacgtggacgatgttatgaaaggatttaaaaaactaaaactgagttttttcaaagctgaaaacttaatgaatagatttttaattccgaatcgggatcaggcgggtgaattagactttaaaattagttatatctttttgtctataaatcttattagtcaatatggtttatatgccattatcgcaactattttgtttgtattaccgtcatggggattattgagtcagtctgatgtgatagcgtatgtagtaattgttttattcatttcaggccccataaataacctgatcaatctgcagcaaacctatacacgttttatcgtggccaataaaagaatcaaggatttcttgaaagactttgaagtagatgaagatgtgaaaaaactagtgccgatagacaacacttcttttgaaagtatcgaattcaaagacatacatttttcatacaatagcgattccaacgacagtgcttttgcattaggaccaataaacttagaagttaaggaaggcgagaccatctttattgttggtggaaacggttccggaaaaagtacttttatcaataccttcactggattatacacaccttctaaaggagggattcttttaaatggaaaagaaatagaatcgggtcaggaaaatcaaaatttaattgcagccgtgttcaccgacgatcatatattttctcataattatgaagaatataccgttgaaaacaatccggaatacaaagagttattagaaatgatgaagctggacaaagtcattttagatgataaagaaagttctgccagaagaaaattttctaaaggacaaagtaaaagaatgtccttgatttttgctttaatggagaaaaaaccaatcctggttttagacgaatgggccgccgatcaggatccttatttcaggaagtttttttacgaagaacttatcccaaagttaaaagcagaaggtaaaacaatcattgcagtaacacatgatgacgcttatttccacctggcagatcgaattataaaatttaattacggtaaaattgatgctgaggtaaaagtagataaatcaaaagaatacagtaaagagcttttctgggcataataaggtgtgcaaacatagcacacggattaaacagattcgctaaagcgaaaacgctgattgacgctgatttatttgtttatgtcttattctgaaaatagaattttaaattatgctccagcggagcataatatttatagcaaaattatccaacaccaaatacaagctccggaggagcgaaatatctatagcatccagaggggcaaggcaggtatagctccagcggagcataatatttataacaaaattatccaacaccaaatacaagctccggaggagcgaaatatctgtagcatccagattggaaaattcaatttgtttaattcctaaaaattaagcgaaacaagatatcatttagttctaattgcgtaaaaatattttaaaatgaaactcacccttcctcagcaagatgtttatttcgagcagttattatatcccaatgagcccatctataacattggggctaagattaaaattaaaggccaaataaaccatgatgcatttcaaaaagcatacattgctttaattgatcagcacgattcgtatagaagtatacttaccagcaagcacgaaaatgttcggattaaaattgtagaagatcataattcagctttgggatttgttgatttttctcactcaggagaacctttcgaggcagcaaatgtgtatatgcaggaagagtttgcaaaaccttttgatttatttggagagcatcttttgcatgtttttaccctcgttaaagttcaggaaaacttccattatttattttccgtttaccatcatatcataaccgatgggtggggtacgtcgttaatgtttcagagattggtgcaaaattacaatgagattctcgaacatgggaaaattcaaaccgtatatccttttagctacaaagactttgcagttgatgatgccgtttatcagcaatcagaatcgtaccatcaggacaaaatctactggactaaaaagtttgaatccttacctcagaacctgtttgataaattagaagataacattcagatcaatgaaagtgatcgcaaggagctaattgtcaaaagagaggtatacaatcagttaaattcgttagcgatacgttataaatgttctacttttaatgtcattctggctatcttgtacgcttattttggaagaaaacaccagaacaatgattttgccatcggactaccggttttaaacaggagtaaagccagttacaaaaaaacagttggtctttttatgggagtgtctcctttaagaatttcgattgattttaacgccactttcgagaatttaattgcagaaataaaaactaccctaagacatgattatcgccatcagcgattcccgttaggaaagttaattcaggagcttcaggtttttagtgaaaaagagagactgttcaatattacactttcttacgaaaaacaaaattattctaatgattttcttcatacccacacacaggtaattccgctcacacataaatctgagcgtgtagctttggccatttacatcagagaatttgatgaagacgaggatgtaaaaattgacttcgattacaacttgaattattttacagagacacaaatcacacaggtcgttcatcacttcgaaaacttagttcacgccattttagatgctcctgatcaagttctaaaagaactaaactatctgggagaagacgaaaagcgccaggttgtcgaaacattcaataccacaaaagttgactatcagaaagagaacacaattttggatgtatttcaggatcaggtgataaagtttagcacaaaagaagccctaaaagacgattatagaagttacacctatgccgaactggatcaattatcaggtcagatagccgaatacttaaggatcaattacggacaagaggacaaatcaccaatagccgttttattaggacgttcggccaatattgtcattgtgttactggggatactcaaagcaggcagagcttatattccgctagatccttcattccccggggaccgattgaattacattatagaaaacagccagattaaactgcttatcaatgaaaaaggttatgtgttgcatacagacgatgaggtacaggtactatctttagagacaatcttagaaaaggccgcaggattagaaggaaagccatccctgacagtttctcctcatgataccgcgtacatcctttacacctcaggttcaacaggcaatccgaaaggtgttgaaatagggcatcaatccctgttgaatttcctcagcagtatgcagcaggagccgggggtgaagccgaacgatgtattattttcggttacaacttactcttttgatatttcaattttagaattctttgtgccactattgtcgggagctgctttatatatggcaaatcaggaaattttagccgatccgacggttattatccaaaaaattcaggagattcaacccacaataattcaggcaacaccaagtttttaccaaatgctattcaatgccgattggagcggagacaaacgtttgaaagtactttgtggaggagatttattaagtgaagcattggccgaaaagttaatcagtcatagtttagaagtctggaacatgtacggtccgacggaaaccaccatttggtcgagtttaaaaaaactggaacatgcgaaagaggcgtcaaatattggaaaaccaatacacaacacacaaatttacatactggattcgtttttgagtccaaaaccaatcggaactcccggagcaatttatatagccggggatggactggcaaaaggatattataaaaataccacattgactcaggaaaaatttataaaaaatccgtttcagacgaatggtttattatacgaaaccggagatgtgggccgatggaatgacaaaggagaaatcgaatttttaggacgaaacgataatcaggttaaaattagaggatatcgaattgaactgggagacatcgaatcgcatttgaataagatttccggaataaaagaatcggttgtaattgcaaaaaaagggaaccagcaggaagcttttttagtagcttatgtggtaaaaacggaagaaataacagatacaagagaaattgttgcgacattaaaaaggaaccttccatactatatgattccaagtacaattgttcttttagaggagtttccgctaacaccaaatcaaaaaattgaccgtaagaacttagcgcaaagggccattgaacatcatacagcaaacgatgattttaaagcaccagattctgaggtagagaaaaaattggcaacctattggaaagaaattttaaacagtaaaaaagaaatcagtgccaatgacaatttctttgcacttggcggacattctctaaacgcagttaaacttgcgggatcaatagcaaaaaatctttggtacgacgttagtcttaaaacggttttcgattatcccacgatcagattaatggctgattatttagtgactttaaaacccaatgacaaacagggtataccatttacaactctaaaaactgattttgcaataacaccttcacagcaagaattatgggtagcatgtcaggatcggcaaaaatcgattgcttataatatggtagccgtttttgaaattaatgggaccgtatttccggataaaatcaacaatgcgatgtctcagttaatttttgaaaatgaaattctccgtaccaattttgtggaaagcaaaggcgctgtttttcaaaaaatagggaaacaagaggatatcgattttaagatcactcagctgcagattgataacgaacaaaaagagcagactattcagcgatacatagaaacaccgtttgatttagaacatgatgtattggtaagaatgctgctcgtacaaacgggcgagacaacatcatcattggttttttgcacccatcatattattatggatggagtttcattagagttttttaccaaagaatttattcaaaaatacaatcatgctgattccttaattaaaaactcaggtattcagtttaaagactatacagcatggttagcttctgaaaatgacgacaaaaccactttcgatttttggcaaagatatttggaggggtacattatcaaagaaacgatccatagagattttaatcaaaacggaccattgcaaaatggagcgtattatgatgatgagtttaccattgaggatactaaagcattaaaaaaattcgctcaggaacaaaaaagtacactttataatacgattattttgcttttaaatgtgctcattcataaaattaacgaccacaatgacattgtaattggaaccgttaatgcgggaagaaacaatgctgatattgcgacaatgataggaatgtttgtaaaaacgctgccgcttcgtgttcggttaaatgaagacatcgtttttttagacctcttaaaacaagttcaggaagacgttctcttactaaatacgcatcaggattttccatcacaacttaaaaaagaaacgctgtttgatgttttagtaagctatcagaatcccgatttttcttttcaggaaacgattaaaatggatcatgccgaattaaaatatgtgacttctgataccaattacagcagatttcctttattgtttaatttttttgaaagcgccaatactctaaaagtctccgttgcctacgataagaataaatatgaagaaatcagcatacaatttcttctggccacttttaaaaatttgtggtctcaaataatagagaacccttcagttaaagtagcagaaattgagtatcctttagtgaatacagcgaaacttcaggaaaccgattttgactttaatttttaagcgtttttaacgattaaaaaccaaatacttttgatacatatttattactcctatctgtctgaagaaaaacatcagagtttgctgcagaatgatttaccgaaatttccggccgattatcaggataaaattaagcgttatcgaagatggcaagatgcacaattatcacttttagggcggatactcttgtttaagggaatcgaggaaacttataagcaaaagcctgatgcgaaagagatcatgcaaactctttataacaaaccctattttgaagataatctggttctttttaatatttcacattcgggagatattgtagtttgcgccttaagcgaccagcatgaagttggtatcgatgtggagatcatgaccgatattgaaacagctgattttaaatcgcaaatgacagaaatagaatggaacaagatcgtcctgtctgacaataaaaaagaggctttttttgagtattggacacagaaagaagctgttctaaaagctcagggacatggtctgatcgttccattgaaatcatttgaagtcttagataatagaaccgaaatcaacggagaaaaatattacttaagcgaagtaaaaatagataaaaactacaaatgccacatctctttaaaaacagatgccacaaaaatttacctgaaaagaatcatattataaacctaacaatttaattcaaccaaaatgaaaaaaataataagtctgtttttgttactattgattgtaccaaaccttgtatttgctcaaacaaaagcttttgcgttagagaaagtaaagaccttttttcccgaagatcaaaatctctccaaagaaaatatagaatgggcatttttaacggttcctgaaaactgggataaaccaacaggaaaaacagtaaaaattgctgtggctgtcttaaaaagcatctcaaaaagtaaagacgcaaacccggtcgtatacatcgatggaggaccaggatcaggtggtattgaaggaatatgggcttggttagaccatccgttaaggaaaaacagcgacattgtcttgtttgatgtgagaggaactggacgctccctgccaaaattctgtccggacctggggaaaaaattcttagaaatattagcaaaaaatcaaaacagtacacaggacgaacagcaaaaaacgattgcatcattagaatgtaaacaagatttactcaacagaaatatcgatataagcgcttataacagcagctctatcgtaaaagatttaaaggccttaaagaacgctctgaaatatgataaatggaatgtttacggggtttcgtacggtacttatactgcacaagtttatgcaaatgatttccctgaagacattaaaacattaacactggattcttccatttcagatatttctcaatattacaatcgcaatacagagaattatatgagcagtcttaaaaaggtttttagtgcctgtgaggaagacccaaattgtaatcagcaatatcctaatcttcaggctgcttactatgaaaccatcaaaaaactggaaaaaaaacctatcaccgttaacgtcgatcaaagaataatttcgagtgggaagtttacttataatgcagaagattttaaaattgcaattcaacagtcactttatcaaaaaagactcatagaagtacttccattattaattaccgaatttaataaaggaaacaaaagtactttaagctcattagtagcagctttttcaggagctttaggcttagattacgggcaatattattgtgtgagctgtaatgaagctgtgccaaacaattcgatttcagaatttaataaaaatgcacgtaattataaagaattacaaggaggactttccttttacaaatcagatttcgtagtatgtgataaatggaatttaggagtaaataaacagcctgccttggttaatttatccaatctgtccaaattaaccatccccgtattagtatttgccggagcatttgatccgataacacctgccttaaatggtaaaattaccgttgacaggtttaaaaaagcatttttggtaaacgctccaatttcaggtcatacaccagggttctcattagtaggagttcaaatcgccgaagaatttataaaaaatccgtttcaaagacctaataccagggaatttgataccgataataaagttcattttgtgaccaatataaaaatcagtggaggaatttcgaattttgccaatagtctaaacgagtttaattggctcttttttgcgccttttttcaccgctttgattatcgccttactttccatttttatttttggttatgtactaattagaaaaagagaagagaaaacggccgataaaattttgaaatcccttattataatcacctctatattaggtttgtttactttcattggatttgttttagcgataaaccacacagccgaaaacaatttctatatacttgcgttcggaataccaaatcagtttaattacctatttataatactcacaatactagttgttcttgataatttataatgaaaatagtatatatttgaggataaataatgtgtaataattatcatacagatctacccgattttggagctttgtttggttttatcaccaataaaaacaagttgtacgtcataactaaaaaccaaacgaatgagagtaaaatcagatagtcaaaacacaattttcttttgttttatatttttgattgttgtagcaatcgcttgtaataatcgaagtcagtcagataagggaaattataaagaacagaataaaaacggtgcccaacaacttgataaagaagtcaactctacaagattaaaattcacaacaggagttcgttcaattttagaggatagtaaaggaaatatttggtttggtagttacggcgaagggctgtgtttgcttcataatggaaagtttcaatattttacaacaaaaaacggattaagtgacaaccaggtcaggaatatttatgaagataaaaatggcataatttggtttgaatgtgggagagggttgagtacatataatggtaaagaagtaacaaaatacacagaacgaaattacaattcagagaaggagtggaagttaaatgaaagcgacctttggtttaaaggcgataaaattgagggctacaatacacttgaaaagtatcccggggtgtatcaatatgaagggcaaaagctttcttatcgtctgtttcctgttacacctaaacctgaggatgggtttaagtattacatttcaacaccttttgtcaaaggtaaaaatggaactgtttggtttggaacttacggtgcagtaataggttatgatggttcaaattttaagatactggataatgaatatcttcggctaaactcaaaaacgggttcttttcatgttcgaagcataatggaagacaggaaaggaaatctgtggatcggtaataatgggatgggggttttgaagtatgatggaaaagaaattgtcaatttcaccgaacaacagaaattagagaagcagtatacgaaaggtaattctcttgaaagggtcttctcgattggggaagatgctataggaaacatttggtttggtactgtagagtccggtgcatggagatatgatggtaattcagtgaaaaattttactaaagaggatggacttgaaacgaaacagatttggattatatataaaagccgacaaggcgaattatggtttggaggagcaaatccaagtggtgtatatcgcttcaatggcaagtcttttgaaagaaaatattaactaaaagaggacacaacggacgttggcaaaagggagagttcagtgattctaaatgtgctagcatgtgtcctaaaaatggattgcaattataaaaattgaaatatccttattatcttgaaaattcattttttaagcattaaaaaaacaactttacttttttgacacaactaaaggcaactccaatgttagccaatgaacgttgtaccaataaatatttgaactttttagcaacaaaaaacaattgtaattaggccaaatttgctctatacttttaaatcaatttaaaatgagcaaaacaattttaattacaggagctgcaagtggttttggaaaaatcgctgcatttgacctagcaaaaagaggccacaaagttatcgcaacggcagaagtttatccgcaaatgagtgatttgattcgtgaagctaaagattcaggtatcgaattaattgctgataaattagatgtaacagattcccgtgacattgaatacatcattaacaaatatgaaattgatattctcatcagcaatgcgggaattatggaaggcggaccaatcgcggaacagcctttggatttagtacgttatatgtttgatgtcaatgtttttggcgggctgcaattagcacaaggatttatcaaaaaatgggtgaatcagaaaaaagcggcaaaaatcgtgttcaccacatcaatgggtggtctttggacggttccttatgttgcggcttattgtgcttccaaacacgctatggaatccattgccgaaggtttgaaaactgaattggcacaatttaacatcaaaattgctacatgtaatcccggagtttttggtacagggtttaacgatcgtggcgtagattctattttccgttggtacaatccggagaaaaatttcacaccaccaaccgcatttgatggagcggctgattcactgaaagaccagttagatccacaatcaatggcagatacaattgtgaatgttgctttagatgaaaattcaaattttagaaatgtgcatccgaaagaaacagaagatttcgtaaaacaattacaagcagaagcctggacagcaaaaagttagatcatttttacaaaagcacaggctaaaacctgtgctttcttttcattcaacaataaacaaaacgatatgaatattacctataaggaagcatcaaaagtattgaatgcttcgatagaaaaagcaaatgaacttaatattcctgtgagtattgccgtggtggacaatggaggacatttgatggtatttgcgcgattggacagtgtgtatggcgtgattgatttcgccgtaaagaaagctaaaactgccgtaatgtttggtgtgaacagcgaaatcatgggcactatcgttggaggttcagacattcacggttacggaatgcttaattccaatggcggtcttttgacgattcccggaggtgctgtaattaaagatgtcgatggaaacatcattggagcagtcggttcttcgggtggaacggtagaacaggataaagaaattgcggaagcaggagcaaatcgcttgcataatttttagatatttgttgtatggcagaaagtagcgaaattatattcgataaattggtgtattcctgtgcatttgaaaaatacagaggacacgaagagtttatacccgagcattttctaggatttcaattgtcgggtgaaacccacgctttttatgcggatggcaataccgttatttctgaaaatcagattttgctggttagaaaaaatcaacttattcgcacgattaaatatcccggaaaatcgggaaaatatcagtttatttctatttcgttagacagtgaaattcttcgtcagtatgcattggaaaataaaataataggggaacatagtaagcaacacaaacaaaaaatattttttgaacccgatgaatttctcaatgcctattttctttcgcttaggccatatattaacaaaacgaaagaagctacacccaagctggcaaacttaaaaatcagggaagccattgaactaatacttcaaaacaaccctgatttaaaaaacgttctattcgatttttccgaaccttacaaaatagatttggaagaatttatgaatcaaaactatatgttcaacgtttcggtggaaacgttcgcaaagctgacaggcagaagtgcttcaggcttcaaacgggattttgcgaaagcattcaaaacgacacccaaacaatggttaagagaaaagcgtttggacgaagcaatgtaccgcattaagcacaagaaggaaaaacccgcagatttctatctcgatttagggtttgaaaacctatcgcatttttattatgccttcaaacaaaagtttgggcttacgactactgaaatataactggatatgggcttttttcaggaattgccaagaactctttttcctccgttttctttactaaatcttctttggcacggatagcgattttttctaaagtttccagacaatctgtaacaaaagtgggcgttacagctgttcgttttttgatttctcttgctggcatattgtcaatttcaacattagtgtaaggagctaaccatttgtcgcctgctaaatgagattggaaagataaactatacttgacttccgaaatacctaataatgtgacgatttgcctggttgtttcgtaacattgatggcggtaacataaatcatgtgccggcgaaggtgtgttacagtaagaaccgtcaattttacaatgagatttagttacatcgggttttgagaatatgacggttttaattcaaaatcttttttttccacatttaaaaagttacagtaaaacccccaaccgaatacccaaaaaagcctgtagaatgagttcgtttttataacattgaactcctaaattataaaccataatctctaagctatttcatcatcacatatttgcatgtaattaaaaattaaaaaacacaaatatgtacaaagtagtatcaatgttcagattacggcttttaataagcacttgtttttgcttattttcgacctttattttttcgcaaaacaaaatcctatttgtagtttctaatcaggactactatggaacttcacagattagaaccgctaatcactttggggagattgttgtgccctacgacgtattttcaaaatcaggatatacagtagattttgtaagcccaaaaggcggagctgttccaattggctatattaatgcttcggatagtattcataaaaaattcctctacaataattttttaatgaataaactcaaaactacgatgaagcctactgaagttgttcctgaaaattatagtgcgattttttatggcggaggtggcgcagctatgtatggcgtagcagaaaatgttagcattcagaaccttgcaagacagatttttctaaaaaacggggtagtttcggctatttgccacggtacggctggcttagcgtatttgaaagacgagtccggtaaatcactctacaaagaccgaaaaataaccggttttgcggataaatttgaagacaaacaagaggagtattacaaaacttttccttttaccattgatggagccattaaaaagaatgaaggcaactttgtgtattctgataaattaggagaaggtttttatgtggtcgatggccagtttgtaacggggcaagatcctagcgctgcctcaagaatggcttccgaaataatcactcttatagaaaaaaacaagtctgttatacagcaagaatccatcaaaaaattggataaagtattctctgaatgggataattctaaggataaaccgggtgtagcagcaggtcttctaaaagagggacaaattgtctatgtaaaaggttttggccgtgcagatataacccacgaaattcccatcgatatagataccaaatttcaaataggggctatggccaagcaatttacggcctttactattttattgctggaagaacaagggaaattgtctttgtctgatgatgtgcgcaaatatattccacaatttcgtgattttggttcaaaaattactataaaacatttactaagtcaatccagtggtttgcacgactttctggctctaaaagaaattgcaggttggcaagaaaaagatgtttttacgcaaaaagacgctttggatttaattttccgacaaaaagaattggattatgaaccaggaacaaaattttcgcagagttcatcagggcttattttattagctgaagtagttaaacaagttacaggtcaaacacttgctgaattttctcagaaatctatttttcagcctctagggatgacgaataccttgttttgcgatgataatgaaatgataatacctaatgcagctacttcgtatcaggtatctaaaaacggattgaaaaataatcttatcaatcattccatttttgggactaccaatctttatacttcggcggcagatttgagccgttggtatctcaattttgacaaacccaaggtaggcagtaaaaagttgatagaaaaactggcttctccggttactttaaatgatggtaaaactacttttagtccaacctcaggaagacttttgtacgggcaacagtacttacatgcaagacgtggcgttccaaaaatctggacgtatggtttagaaggaggctatgcaagcaatatttttatattccccaatcaaaatgttatttcgtttgtgcttggaaataataacagatataacggtagtctagctatgaacatggctatggaagtacttggaaatgtttttccgcagccgccaagtattgactttagtaaccttaaaagcataaaaatgacaccccaacaattaggcgtatacaatggcttttattgggatgatgaaagagtgtccgggcgcagggtttttgtgaaaaatgacactttacgctatcaggtattgggcagtgaaactgaaagtttgttaatacctgttacagagaaaaaatttcaaatggtagttgatggagacgatataattatggttgaatttcgtaaggaaggtgagcattttaaaatgatttatacttctggtgaaagcgatgagtatgcctatgaatactacaccccaaaaacatattctacaacagatttaaatgaattttcaggtacctattattgtaaaactttgggagcaagctatacattggctcaaaacgaaaaagacttattcacaagtaataagagtcaaagtaggatcaattttactcccattaagtcagatttgtttctgagtagtgccagaaatttaggcagcattcggtttgttcgtgataagcaacaaaaaattacgggattttatattaactctgataggattaagaatttacttttcgaaaaaatctaaccctagcagacatatagataaaggttgtacaggaagtatcgaatctcgtaatagatgggggagacaaaatttttgttcatgcctgaggtccatcagaaaacattcttcaaaacgatgaagtgcaatatgatatagaagaaggtcgtaaaagttcaaaggcagtaaaggtagttgtagcataattgtactatcacagttaacttataaaggcacttgctaagcgggtgcctttattatttgtattgggtacattattgtttgttaatcttaaaatgtgctatgcaaatccccgatttacattaagttactactttgctattttttttaattaaagcttttcaattcttaagtctcctaacttcataaatgaaaaaatgacttttgtgcatacaaaaagaatatcagttcgggagaaatgtgaaattgcctaaactttgtaaacaagggcataacatcttttggtggtgtaatttttcttccatgcatcctgatatatcttacatcctgattttgggtagggtcaaaggagctgccaaagtagagatagtctgcttcttcatgggtaaaacgggcactgttgtgagaaagtaaacttttatctttatctgataattcaacaattgctgctccggtactatttcaagtatctttccgcaatggatgttcatcgaggccgccagaatcttaaatcctaaagtattttttcttgtctttttcataaactataaatttattttttttctttagaattatagtgtcaaaaaaacaagtcgtcatcctcaggaacaaaaccgccttagcttttgtggcagagtaggaggcaactccagtatgcttacttccagataaatgacgattgatgatctcataaagttactactgcgctaactgcaacttcttcttcaatatttgcacctaaagcaataaattcagattccctgacggtgctacttgattaatatttgccgcactagtatcgatttgacttaatactgatagttgaaacacttattttaagaacggatcccagtaataggttgtagtaccactatcgattgtaaattggaaataataggaatcagaattaagaactggattaggcaaaacctgagtatagtactgagtgtcattgattgatactggtagatagaccaaagtataaagttgagtactccctgctacgaatccggtaagatcaatcacagcagtcccggttttattcgtagctttccactcgatggtttgagaggcgctcaatccattagtttgcaattcggcggtaccttcaccttgactgttagggtcattgtcattcatggcgataaaggtattatcccatgcacctaaaaagatactgcttgcagaattattattatattttgccaatattcctgcagtatcaattatgatgttgatgattgcataaaatgtagagattactgatacaatatcagcggctgcgaaagcaggtgaactgccattctgaacagatcgcaaaccattgaccaacaatgctgcactaagacggtttggtgcggtagcggtagttggttgaccaactgcccaagccgtatatattccagctgtgaaattctgaatggttggggttgaatactgttgctgataatcggtatagactaattgtaaacaatcttgccaatttgctgctgttggagtgactcctgatcccaaacagattccaaaaatagctgttagatctgaacttgcttgtaccgcattttgaacggtcacttgtaatgaacttgccataattttacttttttaagggttattattattattattattattattattatttgattgattgagaattttgacgacctcagatagaaaagtgaagtagtctttttgcaaaaaaaggtaaccaaggtgggtatagtatgctgatatagaggttgtaatatccagggatgtgtatttggcaacaaacatactttgcgccaatgcgtatatattcgtattgcttagtgcctgcattccgaactgagttgccactgttgtaaccgcttgttgagcagaagttccggtagcttgtaattggatcatataggccgctggagacaattcaagttgcacattggcgttggcttgttgaactgtacctcctgtcagagtagctgtcagggtgatcagcgtggattgtgtgatggtgatttgcgctctgaatcctgttgctgtgggagtaaaactgccggaattggaaacattattgaggttaacaactgccccgcctgatacataagtgagtgtaaaagttgtgtttgccggaacggtgatattaacagtgataacacctatagtggttacgatggggttacttactccaatggctactgccgcagtattcggtatggctggtaactgacttggagacaagactccggtgatcatgctagctggtatatccggtatttgtgctactgcaaggatacccgtcaagtttgtaacagggatgttgggcaattggtaaagcgtaaccttaccgtgtaaatctccgaatgtaatggtaggcaagttggccgctgtaaactgaccggtgatattggtcgcattcagatgagtgagcatactgccgttccccatgaattttccggcaagtacattcccgttcacctccaacacttcattaggtaatgttaccccaagtcctacattaccctgattggtcatgaccagttgtggcggattagtcccagtttggctcggcaaaccaatataaaccaggtttttaaacaaactcactgaaacatccgtaatgggagccgttaagtcgggtgtcggagaaagctgtaaagaatcggtggctacagatactacactaaacagttgttgtaccccgctcacctgaatcacatctccggggtaaatcattgaaaccaattgcatgccgggcaacaattgtgcagatgccgtagcattaccactggtcaaactaacggtgattccacttaagatttgagtacctgaatttgtaacagccagccttgcgggtggcaaattaaatcccagtcccacattctggctggagtccacataaacctgatcactggacttattgatgcccgaatcaataaaatctccgaaattagcctgtgatggaacttttcctgtctggaaatatccctttaaagtatttcttgcttgctggctcatattgttcgatttaaatgggttcacgaaacattgaaggtatcgtcgatttcagtatatcctacgccccaattcaaaggctgttgttgattttttaattcggcactgggaatataggtgcttcctccctcgcacactaccccagcctgataggtcgtcgggaaaggtgtgaaattcagtattgtgaactccgctgtaatctgcccctgagggttgatgccggttgaggtcgtttgtgcaactaccacccctgtttcattataggtattcacctgatatccgcttgcgttgggtaccgaactgaatgttgctgtcagttttccagtcttgtaatcaatagccgcggtcaatgttgtcggttgtgccaactgattgagcactatttgtgcaggtgcactattgtaattaaatccgggattggcccaagctactacctgacaggtatagggtgcattttggaattgatcggtgaatatcaaattcgcaggtgatcctgatgccacaaactgttgatccattattttgccattattatctttgaagatggcctgataataattcgttccaattaccgtattccaatgaatggtccaattgtttccgttcagtgattcagaagtaatttgtggcgttgccaatggattgatattcgggctacctccaccaccgccatttgatccagaacttgaaccacatccaagtgaagccaatgcgcctgctcctgctcccaatgcgcctaacactcctccggcaatcggccctaattctgctatgaaggaattaagtaaagcttgtaaagctttatcacagatttgactcagaattttttgtgctccggcctttcctgcaaaaaccaatatgaattgtgccagggcttttttgtcgttgaccaattcctgtactatggcctgagcattttcggcaatgttagtgcgaattgccgtgattataccattgaagttgaactcggatggcaacttgaaggataaggccaattttggcaaattgatcgaacaaacgacggttcctgccgcagatatggtgtaaaacccatttaacacaaggtaaaactgaccttgagccactcccggtatgtttggttttttcgtggtaaaactcgggcttattgaaaaattggtttctataacctgattgaatacaatatccaataccttaccacatcccgatgccgaattgatgtccttcagtgccttggcaaagtctataacgggattggcaactgctacgcctggccaattggtaatttcaaaattggtgccatcataggacatggccaaactcggatttgtgaatggccctatggttccgttgtaagtcaggttagcattgaaggtagttttgccctgcttattttcaatggtaagtccccctgttccaaaattttcgttgaaaaattgaaggccacaattcaatctgaattgttttgcaccgttttgggtactgacactgagtgtcggcccaccggtatatccagcattcgctcccgtgagggtcaaaaaaaacgtaaacccaatgggattaaaaaatgttcctgaaagttgaacaccgtttccactggctacattcacactcacattcaaatttggaaattggtaaccagccaattcaaacgtgcatagagcagctacgttcaatcctgcttgtggtgataggatgatgactcctgccggaagtgctgctccggtagccaaataataaacttgggcgttggctaaagtcagatcaatgaaatcattgggtatggaaaccgatgtcccgaaaaactgagtaatcaagacacttaagctgaaatcagctatttgattaaccaggatcaatacgggagatcctccggtgaaatagaccccgaccttagcctgcaattgattaatggatacctttcctgtagcttgaatctgtacaggggtatttaggtgtttgaccaaggaaaaattgaggtcatcaatatccaaaccgagcggaattccgaagggtttgtcccaggtgatatcggctgtacattgaaagctgtatttgcttccttgagcaaagactacctgtatagaagtgaaattaacactgggcaataatccatttggatcaaaattaatccccccaccaatttgtgagaggatagaacctatactgatggattgacctggttgtgctacccaaccggcgttaatcagccactggccagtaccaccatagctccctgaacagctaaagggctgccctgctatagtcaattctccagtggatgaaataacgacgctcatgatacttatttatcagatgatggatcagctaatagtcaaggtagtccctgatgcagaagaggttttatcggcattttcaacaaataagtagtaagtaccagcttgcagtgccgatggtaaggtaaccgaaatttgggttgctgtacctccagctgctgctactgcactgggatcggttgaagagaacgtagttgtggttccaaaataaaccttggttcccgttgctcccgtaccaagcaggttgttaccttcaatggtgattaccgcaccggcagcagaagtagcaggcgtgaatgaatcaataaccggtatagtggcataattcacttcaaatccaacatggtcaagcttaaagccagggaagatagtccaaccctgtccgttaccgaaatcgaaatcaacggcgatgtcaaaaattccagctgacgaaatatacagcttgttaatcgttaatgaggtttctgtaattccagaaaaggtaattgaaggtacttgaaaattgttgcttaggtaagtattcaaatcagcgagtttgaccacaatgggggatccagcgggtaaagaaaatacttttggtgatgccgaaatgttttcggtggtgagggtgatcggagtcgaaccaatttcgatggtaatggatccgcttacaattgcattgctcataatttgtgatttagattaattaattgatttgtatgtatgattttcaaaacatgttgacatggaaattgaacatcatcgggctaaagtcgattaaggtgatgttaaccgaatttgggcgcgttgagtcagtaccccggaatccagagggccactgttttactgctcataataccgttcagatttcaacttctttttttatgcttgacgccccaccattgttcttattttattccttgattttttttctaaaaaaaagtattataaatcatgcaaatacatgtgatttctctcgtgaaaaaaatggaatataattgacattgcttgtgatgccgtcaaatatagtattacctagtttagatctgttaaaaatggacatcgagaatattaagcagttgttgaatattaatttactataagcagtatatgtaggagaagcttcgttgcgtaagttattatagaaatacaaagtactatattcgattgttgagttattaaaattataatagggtaatgctccacccagaaggaccttgtttaaggatgaactttgtatattctctattctaatccacctaacagaaggtttgtttccactactgtaattgttaagattgacgccaatcacggaattattaattcgggaagaaatcgatccttcaaccataaaatttgataatgattttatgttattgattataagtgatgtttcaatactataaaaggtatccaaaaataagctgttggatatttggttagaaattccggtaattactgctgaacatgcaaatgttgtgtttgataatgttacagcatctacatttgtatcaaaattaagttctcctaaattgttttgaattactgtattctcaaataatccggaaactttcatcattttgacactaacaggctgatgattttggtctagtttaaaaattgtaaagtctttggcatcattatatgaactgacttccattgtaaaatcaacaatctttgtattggcatcgattgttaaagatttatgatctaaatcatgagcaacataaaatctttccggtgttgctgtagttgatttagttgctgtaaattggtaaacaccatcaaatcctgttaaagaagttaccggttgatcctgattaagtgtttttaaaatagaatctgttgaaattttccatctgcggtagcgttgtactctccagtcgatttttaagtcaataccaagagctctgttgtatcttcttaagattgttcctttagtagcgacacttcccacgacaggtaatttatattcaatactatcgtcaggataggttacggatttcccttctaattcaaactcttttgtcgatttcgcctttaaaataattgattctaaaggaacattaagattttcttctgccgacatattcatgtatgcggtgccattgtgaacttcagtatttagtacccctcctgggcgtattacgggttttccgttagcatcatttacaactaaattgtcaacaattccgttggaatatcggggtattgaatattcaaattctaatcctatgtgagcttgcattccgttggcaaaacggaaataataaccctgagaggcgacaagactcacggttgttgttgaaccaatctgtaatggacctgtgtaaccatcaggaagtttggttataacaacggttttacccacagttaaatttaaatcataacctacatccagaacagcatactttgccggataagaatttattcgccttttaagtagtgttggagaagagtttgatccagtaatggtatagatggtttgaaaatcattgatcaagtaataattgcccgggatcaatgaattggattgtaccagatttaatactttttctgtatttacattattttcactttttataagattatttacaaaatcgtaaactgcttttgaagacggataatcactattgcttgataaggaagaaaggctcagacttttattagcaatgttttcttttgatgcaaataaagtttcatgtgctgttttgctggatttatgatcttcaaattgagttctttcggttttattatttaaagtttgtgacagatgttcaatagaactttgaggaatttgttcctctttgtgccaaaaactttgccaggaatccgaaaattgtttttgtgttggttttttgccggttttgaaccagtttagaatggtattgatatttgttgccataatatatttggattgattgtgagattgaattgctgattttgacaaactataatttttaagatattgattgtattatagtcttgttttttagtactggtcttagtttttttcattgcttaaacttgcttagagtgatatatgatgattcgattctacgaattacgtaaataggtatttctaaacacgttgaaaaaagtatagacaagaaaaggaattaaatttcatattacgactattgtgtttttccgagtttttcggctttttatggattattgaatattagtgatgataccatttgtaacggttatcgtttttccgtcactggtcgtgaatgttgtgttaatggaggacaatgaaatattaccggcatcgtcagcagcagtttgatttacttttattggtaatgtgcaagtttccgctatgccattattaaattttggaaataataattcgcatttgtgataagtttgctggctaattggatatggacctgcggtaaatgtaaatctgtctgcaaacatctgacattcgctaaaacttgtgtcaaatttcttgaatattgaaaaatattcatgatttatatcaaatctcatggtaggatcatagatatcagaagcgtactttgctccatatatataatgtggacttatggataatttagaaaaatctgaaaaattatctggccctgtgggaatatattttagaacaaatccttgattaagtactacagcaaaaccataataattttgataatcagcactagctttgaaaacttgttgaagagttggaatcttgccactaaattcactgagcttctcatcaattccttcaatatcagttatatcaattttttcttctttgtgacggaaggagtcccaggtannnnnnnnnnnnnnnnnnnnnnnnnnnnnnnnnnnnnnnnnnnnnnnnnnnnnnnnnnnnnnnnnnnnnnnnnnnnnnnnnnnnnnnnnnnnnnnnnnnntcccaaaattgagtttgtgttggtttaaaaccagttttgaaccaacttttaatagtgtttaatgtttgtagagccattttttaaatgatgttgttataggttattaggtattgaaacaataacaaatctccttttgataattgttcatttaggataagataaaattcctgaataatgattaaagcactttcaagaggtctttttttcttgtcttaaatttaggcgatcgaggtaacgagatgtttaacccatccaatagctgttttttcgtaaacagtcgaaccagtatcaatagagaggcattgaactcttgaaccgatgctaaagaatgggtatgttgaatctaaatatgccctcgatacaggagaagttgatggatcgtcaacaacttgtagggacttactgtctacatatgcttttgtagttaacgaagtgtttcctcccgattcaataagttcaggagttaaattgggagcttgtatttctccatttgtattttttactattgctctatttccggcgccatcagcgagaatgatagtgtttgatgtcgttggggacaagcctgttatcttacctatggctacgtttccagatccagtcgtaacgcctataggagttatgccagccgtaactatgaatatattatcactacctgttgtcaaattattagatacggcactattgctcgaattacctattaaaacgtttctggctccggtggtgatattaccccctatttgatggccaattgaaatgtttaaatctcctagatttccgacaccacctaatgctttgtatccaattcctatacttcgtttgaaattagaatcaactccaccgccagcggctgcacctataattgtattctggctagatgttgtagtatatgctgatgctagcgctcccagagctagattataatttccggatgtattactagctaatgcgctagctcctaaccctaaattctgtgttccgatggtactagcggaaagagctttccatcctatccctgtattgaatgtgccggtggtattgttagataaaacaagttcacctaatgcggtattacctatggtatcaacagcaccattacctttgcctatccttactccatttataagtttatcaacccctccaagttcttgtagcgctatgttattaactattccaatttgtgtagccgaaactggagatcctatttcatccgtagtggctatagttcctgatttggcaggaagtataatcgtagaatttgattcgcctggttcagcaaaaacaagcctattgtgtacagaggcaccgttgaaatagaggaatccgtttttggcagatgaaaaattactattagtggctttacctactgtttgaaagccgtttgcattatataacgtgaagttattgttgtttgatggatcagtcatagtaattgtggatccggatattgtagtttggttatttgtatccgtatcctcaatttgcatagcaatgccattaagtattgcaactttgccttgcgccagaacgtcttgtaaattgggagtcgtcgccttcgtaatttgtttccattcgccattttgcctgccatattgatttccgttgataggagcttcttcgatttctccatttataacaatatccccttcgccaacgatagattctccattgatagttttaaaatcgtctgtggtggcgattgtataagtattattattaaatcgttctaattttgcaggaaattcaaatacattactggatactgggtcggcaatttttattaaggtatgttttccatttttatatttttctaatgaaggatcaccactgaagagggatatcttgccttcatctccggtttctaatactctgcagctaagtgttatttggtttgttaactgaaataaggaggtgctgtcaaattcacttcctaccgtaatattattatacttatagttaccgtagtttcccattatagttgcattgctgtatccgtgagaatcagtagggtaagcagcaataggattggtatccagcactgattttaatccttgtggggcatgtgcatttttatctgttaaatgatcatttaaaactgttttatctgccttagcagaaagcaattcgtcaatcccttcaatctcttttacaggtactttttcgtatttgtgacggaaggagtcccaggtatcccaaaattgagtttgtgttggtttaaaaccagttttgaaccaacttttaatagtgtttaatgtttgtagagccatattttttctgtttaatgatgtaagtaagatttgtttaagaagttttttaaattatccttatcaggtattttgggtcttttttccatgcttttaaataatgtttaataggattgtgggtaaattttaaagtttcgaatgcctataagaaaataaagctatttgattttttgagggtgtaaaagtagagcagaacaatactaaaaaaagaaaaaataaccttctctattcagtagtttcagtagaatgagaacttactgaaactactgaatacaaacgtcttgaagttttaaaataacaaactatgagactacttttacactctgaaaaatagctaccgatgagtaaaaacgtaattcacaatttcgatattttaatacaagacagtgctgatgtaaaaagtgctgaacatttaaccgatgtcatgataaaagaactggcaaaaatttcaaaagaaatgagtcagcaaaaggatatagaacaattatggcaggagcagaagagccaaaatccttctgttaacaattctaatttctcagccgaagggggcgtgaacgatacaattgctaaagcaggaaataacacagcattatcggtaaacaatactccttcggtttttggagaagcagggcaggcttttaatgatgtaacggtattgcccggaactattccttttggaacaacaaattttaatacttcaatcggagaaggcgttgcgggtactatcaacagcacaatgatgagtactgtgatatcagctaacactacttctccgatattcggagttgaagatgatactttaaatttaggtaaaggagtaacaagtcagatttattccggtgttgaggtgcaacaaatgctaacgataccggaaaaactgcaaacaaacggtgaacccactctggaagttgttaaacaagcaatcaggaaaaaaatagaacaggctaatgctataaatgatagaatagcagtagaatattggactaaaatttctaaggctttagatgaagataaaggagtatctgttcaggattttgacggtaaaccaaatcatgcattatttacagaaatgtacgccgctcttaaacaactaaattctgtggcagcgacccaaaattttaattgggaaatcgttcgcgaaaaaatgattaaagcaattgataccaatatcttgttgggggaaatttcagagggaagtaaaaaacgttgggaaacgattagagaccaattaaaaaaagacacaatcaatgtagccaatctttttgaacaatataatgagctgtttttattgctaggacaagtagagggactggatgacttacccggtacaattactataaccactaaaaccaaaatttatcctaatttaagcgcagacagactttatggtaagattggaagagaagctgtctatgtatttttaaaagaaataagcagtatagatgcgcccggaaatgcggtaaaaaacggagcggtcaaaataaaaaatacaactgcttcttcctttatcgtaggagaaagtttggagtttttccttgacgaaactctcatcgttcacaatggaaataaaaacgaaggtattaactggattgtttacaaggcgagaaaaggtaaaaaatacgaagaaactatttttgaagacgagggtacatcctttagttataattttgatgcagaaggtgcttatataatcgaagcttatgggtatgaacatggagcaaacagtaagaaaaataaaaagccgttcgcttttacagaagtaaaaatagtggctcaggagcttgtaattttacctccttccacagttaaaggaagattggtaagaccttcagcgaaagagtttatatttaaaacagctttaaaatacccgaaagtaaaatcactaaatccattaaaactttactatcaaatagagagtaaaattaataataaaggaaccacaatttcagacgaaaaagaactggattcaacaggaaacattagcgtattgatgcctgatttgggaacttataagattaaaataatcagtaaggatcaatatgcattaacgcaggagtttgaagtttcagcaattaaaaatgaagtgaccagtattggtcctatcaaaggagaatcaaacaagaatgtctttttattgggcggttcagataagacttttactttagaagcaaaaacttttaaaatacctcctacagataaagaaaaacaggatgtaaaatggatcgtttatgattctaagaataatccgtatttgacgtcaggagatatctggtatactgaaaagggcgctccaaaaagaaagcaccttcataaatgggaatcttttgggatatctgtacccgataaagaagggcactacacaatagaagcctttagcgacgcagcaaaaggggtcgatgctaaagctactttcaaaatggaggtacagcgtccgcaggtaaccgaggcctattgggcctatagtaatggtgacaaaaaagaaacttccggtttttcgggagaagtaaatcatgtaaaagcgaagattccggactatgacaatcagaaagtaagaattaatttttacttaaacggcagtaaagagccttcttattataatgaaacgacaacgaatgaaagtggtgaaataaataagattataacttttgatgatacttttcagaagcgttttggggttcaggaaggaaaaacagctaaaattaccttcaaattaatggggatacaaaatggcagattgtatccatttaagagaaatgccgatgttaacaccactgcggttttaaatgttgtaacgagtgaaaaaataacagcggcctattttcagtacgatggaaaaagagtcacggcacaagatgaaattcctcttagttatgatggcgaatatgtgaccattgtcgctaaaacacaaaacatgatcggtaaagagattgtactaacatcccacaaaaaaagggaaaaaccaaattttagaagtaaagtaaaaatagattcagaaggcaatgcatctgcgacttttaaaataacccgtcttaaaggaacaaaagtcggcgaaaaatggagttactatgttggtatcgaagggcattctacgaaacatttggcttataaaggattgaatatggttgtgggagagagtataaaaaagaaagaaattatttttccattattagaaaagcctacaaataatactggctcaaaatggggtaaaaactataattggactgctgctgatggacataatcaagcaacttttgattcttatagagattatggagcaagaaaacatggagggagagatttgtacacggagaaaaatgcagaagtgattgctattgctgatgggaaagttttagaaacggcttatttttattcgcaaacaaatcaggtcacagttttacacaaattaaaagatggcagaaagtttatcgcaaggtatggtgaattaaatcctaaaagtataaaagtaaagaaaaatgatattgttaaacagggagatactcttgggcaaacaggaaagctcgtaggagttacagtaatcactggacaagatatttatatgttgcattttgaaattttttcgacggaaaatggggaaaacttagatagcccacttacaaatacattaaatggatctcctttcaaacgtagaaaggatttaattgattcggttgatatcttagtggaaggatataaaaatgcatttaatggtaagcaaaagaaaggaccacaaggtaatagaatggatatacaaaaaatgaggttaagtgaaaaaggaaaaaaattcataaaagactgggaacagtttaagccacatctttataatgatgatgcaaaagaacgcaattgttcaattggatatggtcatttagttcataaatttccgtgtaatggctctgaacctcaggagttcaaggacggtattgatataaaaagagcaacagaattattcgagcaaagggtaatacaattcgagaaggctgtaaaaagagatattcatgtatatttgtatcaaaatgaattcgatgcattagttagtctcttatataatacaggtcagaattttttaaatgtaggaggtcttaatgacggagtaacgaagataaagaaaaaaattaatttaaaagattatgaggggggagctgacgaaatgggtgatgtgacaaatggaggattagaaggattagttgttaggagaaaggccgaaattaaaatgtttaaatataatgtatatgattcaaatcactaagtttttttattttagagctacagtttttttagttttattatctcttttttcatgtaaaaaagaggaacaccaaaatcatgtaataaataaagaaaagaaaacggagattactgatatttcagctaaagtaaaaaatagaaataattggattttttgtaaagctgtaccattattaaaagacgagtatgtttgcgatgttgaaaagtttaagtctttaatcattgatatttccggggattctgtatttatttcaaataaatattctgatgaagtgtacagaagtaaaattttatcggaatctttttttgaacataaatatttacttcgagcatatcagaagattttgaaagatgatttcaagatcatcttgccaaataaaattgagtgtattcggaataagaaagtgtatgacaagaattctgaattagataaatattttcaggatgctttctttgtcgataattacatgtttgttgaaagtgatggttgtgtaatcgcatttgcaaaaagtagtaaagataaaaaatctgcagctgagtgtgaagatgtggcggtagaaatgggaagtggtaaagtctgtacgataaaaaatacaagtttggctaaagtttatgaggagattatttcaagtaaactagttgaaaaatcatctgttttgccaaaaagaataccaatggttgacagtataatgaacatcaacaaaaatgggttaattgatgttaaatttaaagtaaaatctggcaaaatagaggtcgtaatgaattttgatggtggagtaacagaaataatattagaaaaagaggaaaagaacattaaaagaagtatctattactatgcagattaatgatgatgctgtgaaagatcattgagatgggcaatagaagataaattaaaacaaagagttttaatcaaaggaattaatgagtaagagtgcatgaaaaaaataaagtagttatttatcttctctccctccttctctttgcttgccaagatcaaaaaaaagaaaccaatgaaatcaaacaagtcaaagaaataaagatttcggtaaacaaaaataaaattgcagcagttaaaaatgatgcattgtatgattttgaaggagaatacgaatataagaatagtgattcttcaaatgaaaagcttcttttaatattgaaaaaagttgaaactaaaagtattcccgattttgaaggaacttcatgggaagagaagaatgaaaaaggagagaatgttagtacgactcttgcaggattgctttatgggaatacagatttgtttgaggaaacgagagaaggctatgcaccaggtttttttgttgtaaatgttcaggttgagccatttgaaaacaattcattaaaagtgaatgtgcattttgattcttcagaccttattagaaaattctgttcaaccaccaattgaatctactaaagaattatttgtagttttagatcccaaaaaagaaaaacaaatatgatgaatataataaagagtagcttttgtttaattttagtttcttttatgtgggtttcatgctcaaaagaaaaaagcttagtagaacctgaaaaaattgaagcctcggaaagtctcaagaataaaattcctaaaaacttaaaaattgtaaagactgaaaaagtaaacttgaataatgatttgactatttttatctgtttaaccttagatgaaaaaaaaggagaatataacgagtattggttttcgagtaatgaagaaattaaacagataaataaattttattctgaatctaataaaaagtggtttgtaaatatcgacgaagatccggaattagaaatgttgaaaattataacagaagaagggtatattgattgtgccttttatgatgttgataagaatagtttcaattctaatgttatttttaattttgatccactcatacttaaagatgataaaaaatattggggattttctggagatatagatgatattattctgaaagataaaaaacttctaacaacgattgaaaacaatattccggattatgaagagaaaaagatgagcgtaaatcaaaaaaaactaccaatactatattttaagagtgataaaaaagatttagatagtatagaagaaaaaatagggagttttgaatttatgaatattaatgaaatcagagaaaaaataaaatagaacagaagcagcctaacttggttgcttctgttctattatccaaaaccaaaaaaatatctatgccccctttttcagcaaaagaataataactttctaaggctatttttaggattataaaaaagcgtgaaagtaaatccaaattcaaataaagaaaatcagatataatagtacaaatgatatatctaaataagaaaatatacgacatgagaaaattgctgttaattttagcgcttggctttttttcttgtaaccaaaaacaattgccctctgagaaggatgtaaatattaaaaaatattcagatcaagaaaaaaacgaccataaccttgagaagaaaaacggagatttaaaaataggtgaggtatttaatgattcagatttaaatatagcaggaatatatgctaattatagtagcggtaaatataaatttgaacaagaataccctgattttttaattgattcaaccttaacagaagatatgagatatcaaagtatattgaatttagaaagggaaacagtaaaggatgaaaatgtaattagaatgaaagactttggagtattaaatagtaataatcaaggaaatttattaaaaatccttttaaaaagagagaaaattgacaaatggaaagtaatagatatattaagcattggtaaagcaataaataaggatatgaaccaatatgtgatggaggggaataaatatttatcctttagctgttacaataataaaaaagagcaatattttgcggttgtaatcaataaaataacagcatcagggaaatatgaaaaagtgctcaaggcatttaaattcgacttggtaaaagaaaaaattattgaagttgatttaaaaaaggaaaaagtggattgttttccggaaataggtgatgaataaaaaagagttgtattccaaaaaaagaaatgcagctttttttataaatgcaatactaaaaatagcatctataaattccctttattagtgaaggaataataactttctaaggctattttaggattataaaaaagcgtgaatgtaaaaccaaattcaaataaagaaaatcagatataatagtacaaatgatatatctaaataagaactcttcactcttcactcttcactcttcactcttcactcttcactcttcactcttcactcttaactcttcactctttactctttactctttactctttactctttactctttactctttactctactaaaccgcaattggtgcagacagacagctctccggaatatcaaaagcattcaccagagcgaccgcgtcaggtcggatatcccaacaaagttgattgactattttacgaattgctttcgttttgatagcttccatataaccatcctcaagataccaggctttatttttttctaattgtgaaagcgcatacaactgattgagtttcgttagaatttcttttgtcttactatcttctacggatttaattgcgagttgaaattgctccagcaccactctctccagataagcctgagccacgtcgatcatttggtgctgcacgacattaaaagcgtcgtaaggttctaaacctccatcaaccagttttttgatgcgtcgtgctgccgaagctaaaattgttttctctctgtgaacaaatgcctgtaaatgaaaatccccatccaacaaatgttcgtcatccgtttttctggtggctattgggtttttctcggtaagtgccgtttttgcattttcatacacataattgataatccctaacgagcccatttctccgaaagtttttctgaattctgagagtcggtttttcgctaccaactgcattaaaacagtattatcaccttcaaaagtggtataaatttcggtgtcattttttaaagcatcgattcggttctcagataaatacccctttccaccacaggcttcgcggcattcctgaaggatatctcttgtactccaggtcgaataggatttcattcctgcggccagtgcttcaatttcctgcatttcagcttcagttctgtttaaaaagcgattggtaaggtactgcagcgcaaaatgcacagcatatgtttttgctaatggcggaatcaatcgacgctggtgcattctatagttcaaaatcggaacttctgatccgccttcaggtccaaactgtcgacgctgatcgctgtatcgaatggcaatggtcaatccggatttggctgccgccaacgctgaacggggaatcccaatgcgaccgcctaccaaagtccccaacatggtaaaaaaacgcctgttgtcactcggaatcgggctttcaaattcccctttgtcatttacagaggcaaaacgatcgagcatgttttccttcggaatcactacctgatcgaaactgatagttccattatcaactccgttcaaacccatcttatgtccgcaatctccaatcgtaactccttttagtacagttccgttggtatctcttaatgggacaacaaatgcatttacgccataatcgtgatcgtctataattagttttgcaaaaacggttgccatctgaccgtgaatggccgcatttccgatatattctttttgagcatttttatttggggtatgaatgataaaagtctgatccgcatgattataagttgctgtcgtttccagcccttttacattagaaccatgatgtgtttcggtcatcgcaaaacaacccggaatttttagtgttccaatgtctcttaaatatttggcataatgtttttctgttcctaacgattgaacactcatgccccaaagtccaaactgaacgccaaatttgattaccaaactcaggtcatgataacttaaggtttccataatcgcaaaataatcggctatgttttctcctcctccatattgttttgggtaggccatattgccgagattctctgctgcgagcagcttacaccaattgtaaaccgtctggcgatacaccttaatatctgtggaagtttcgtatgcaaattcaggtcttgaaataattgcttttactctattgattatcccggcttctttaccatttaaaagagctgtaattttttgaacatcaaacttgctgttagtctgagagtttgatgtaaaggaattcgcttttgttttaaaattctgaagcgcttcttcccctaaaattcccagatcattttccagttggacaaaatttgattttaaggtcgaaatgtccagatccttttctgaaagtgccacggcaatatcaaaaatcgatctaatatcttctttattttcaatgcttttctctatatccaatttccattgcgtcagttcatttcgccccggcggatttgaaatatcaactctggaaagcaattgttgtttttcttcgggcgaaagccaggtaaggtcattgataaatttctgaatggtaacaaactctttctgagtcagtaaatcatcagaccacactaaataaaacaacggaataaaggcctggagtttggtgtttttcataggaatattggtttttaggtgtcgaaacatcgatttttagcgaattatgccgcttagatcttttttatgtgtttaccctttatgtgatctaaaaaagtaaaaatgaaaatactcattcctgcttacataccttgttaagattgtggtaattttagcttcgttccggaaaataaccatacaaaatacgagaattgtttttctttggaattaggcttttgccctttcagggcgtaaacgatcatttctaattattcatagtgcttcgcactatgctatggctaaagctctttcagagcacggattttcaaatattcactccctaaaggttaatcaattcacatttgagtataagtgtcctcgatgaataaaaaaactgaagacttaataacttcagcataatacaacgtactatgatctaaattaagaaagagcacaaatatctcaaatgagtaaaagggctgaaagcccaataagacttgcgtagtgcaacgcattatgatctaaacgaaacaaaaagtataagtatccgaaatagataagaagactcaaaggcccaataatactgacatagtgcaacggactacgaactgaattaagaaaaaatataagtgtctgaaataaatagtaagagggctgaaggcccaagcacaagcatagtgcaacgcgctatgaagcatagaaatgatcgtttacgccctgaaagggcaaaagcaaacaaagaagcgtacacattctaaaaaaaaacaggaatgaaaaatattcattcctgtttacacatccgataagattctgatactttagattttaaaccaataaaaaacataaagtatttcaaattacttgagaacctttggatattgcgttattttttgcctaatggcaaaaatatgatgtgaattaaaaaccaatacagccagaaaaacaatgctataagccacaatttgtatggatcctattggctcatgataccaaaagagagccaatagaaacgcaatcattggattgatatttaaaagcatacctaccgtcgaagaattgattccggaaagtgcatataaattgagaaacaacgggaatatggtaaacagaatcgcgatagtttcgatacagaaataaaatttaaactctgttggaatcggtccgctgtaagccgggtaaaagggtaataaaaataaggctgccaatgtgatatgaaaggtgagcacaataaatttatcgaatcctttgttgatcctttgacttactaaatacgaagcataagtagaaccaatgactatactaaaaaccatatccataatattggcataggataaaagcaaacaaccggaaacacttagccctacagctatccattgagttttgcttaatttctcattcaaaataaagtgtgccagtagggtggtcaaaattggacatactaagtaggccaaagaagttgcttttacactaacatgattcattacataaataaaagtaaaccagttggccattaaaaaaacacttcctccaatattcaacaaaagtgatctgcgtctctccaaggctggtaatgctttaaaggtagcgatggtttctttgattctttttcttttaaaagtaaagacaatcagtaacatgagaatactgcagctgaaaacacgatagaataaaatatctaaagaaggatactcgtgaatgggctttaatgccaagctaaaaaatccccagatgatgaaacagataatggccgctacataatattttgttgttttcacaagttattctttttaggttcgttattgaataaaacaaatttctaaaaaataaaacagcaatacagatacagtttttgtaaattgcaccataacagtttcttttttatgaaaaattccaactacttgtatctgcagtttgcagaccgaattgaaaaacaaataaaatcgggtgttttaaatgtaggcgataagctgccctctatacgtgaagtctgtgccgaaacgggttacagcatgagcaccgtaagcaaagcctattatgaaattgaaagcaggtctcttatagaatccagacctcaatccggttattatgtgactaacatttcggccagaaatattcctgaaccttcacccagcagtcctgttttaaaatgcgtgaacattgaccgggaagatttaattgatcaggtttacaaaaacatgaccgatccgagtattacgatgctttctatggggtttccctctaacgaattgctacctattgccaaattaaataagggaatgattcaggccatgcgtcagcttcctaatagtggcacaagttacgaacaggtacaggggaatcttaatctacggaaggaaattgcaagatggtcctttacctggggaggttctttaacagaaagagacattatcaccatgccaggctgtacgagtgccatatcacattgtttaatgacactaacgaaaccgggagatactattattaccgaaagtcctgcttattttggcatcctgcagttggccaaatctttgggtttgtatatcatggaactgcctaccaatatgaccactggaatagaactggatgccctaaaaaaagcgctttctactaaaaaaataaaactctgtttgctgatgagcaacttcagtaatccttctggaagtatgatgcctgttgaacataaaaaggaagtggtgcgattaatggaattttacaacgttccattaattgaagacgatattcatggtgatttgtactttggctcgagtcgtccaaccaattgtaaaacctatgatgaaagtggcattgtactttgctgcagttcggtttcaaaaactttggcaccggggtatcgtgtgggctgggtttctccggggaaattcaaaaaagagattttgcgcaacaaaatctatcataccctctctactcctaccatcacgcatcaggtagttggcgactttctgaaaaatggccgctatgaaaatcatcttcgaaaaatacgacagatattgaatcacaactgtacgaactatatcaatacggttttagagtcatttccgaaaggaaccaaggtaagtcagccacaaggaggtttttttctttggattgaacttgataagaatatagatacggctgctttttatccattagcgatgcagcataaaattagttttgctccgggaagaatctttacttttcaaaatcaattctcaaattgcatgcgattgagttttggacttccgtggactaatgaattaagatcctctattcaaactctgggaaaattgattgatcagtagaactaagtgacagtttacagtaacagtttgcagtcgcatttcacattttacacctatgtttttcccgcagatctcgcagattatgcagatttttttaatctgtggcgattgtttcaacacataatatagatactgtatctatagaaaaggcgtctcacttttcaaagtttgcagtcgtagtttatagtcgcagttatcaactcacatctcacatctcacatctcacatctcacatctcacatctcacatctatttttttcttatacccaacgtgttaaaacacataaaaaaaaactggacagccgcattaacaaagcgttgtccagttaacaaattgagaaaccaaaatcaattcacataattataaaacaaaataagcgttgttttccgctttttttaaatcgggtttaagatcgaattctttgatgatgtcaaactcactttgatactcgtttaacatttgcatcagattcttttcgatagtattcgaaattgccgttacaggtgtatctgtaggtctgttttcgaatggatcctgtaaatggattgccattttttcaattaagaagaacgttcctccgataattgtaattaacggaacggcaaaccagctcaataaactgatcagtccaaaaggcaataacaaaataaacaaacacagcgtcattctgatgtacatgctgtaagtggttggaaaaatggtatttttaatacgctcgcattttcccattgcatcacataatcttgacaaagtattgtctatttcaacctgttgataaggatttaatcgtttatcctttttggcaattctaagatctctaccatgaagcaataatatcgcatttggaatattctgatggtttttgacaaaattcagttcctcttcactaatcaaatctttgatcggctttatcgcatctttattacgcagcgcctgtcctaagctataacaccatgcaatttgtcttttggtgaagttctccttaaactcgtttgcttcaacagaaaaccccggatctttataaaaagtgagcatttgtctcaccaaagttcgggattcatttacaattgatccccaaataatgcgtgcttcccaccatctgtcgtaagcctgattggatttaaaagccagtaataaggatataattgtacctaccatggtaggaattgcgattggtatttcgatcgctacattgataaaataatgatgaaaaatttcaaataaaatggtgtaagtcattacaagtgccaattccaccttaattttcccgagaacgtacctcattggaattcttttctttaataacatatctttccgtttaaattaaacttgtattcttttcgaagaaatgaggttttacgccaattcttcatagagcgaaagcaccggtagacccgttttatcgtttatgctctcttttttatttttcttgaattgtatcttctctcctttgcgggtttccactaacaaatcgatatcgtattttgaaatcgcttctgataagtaaggagcaaaattttcgtagttgtcttcaaaactggaagtctggcttacaatttcaaatgaaaaattgttgttcaaaaattgctgaacatcttttacatgcatactggcacgaccgttttcgatataaagcgctttattgaagtcttctttgtattgctctgaacctaaatgcagaattggacacttttgatttccggctaattgtaccaggtattggtgaattcgttttgtttcctgcttatacgaattggtaagaactaccagttttatagcaaaaacatcaataatacgtttaaaaatcggagaagaaagtccgtattgattgtgaacttttattttacagttgggtgtgtgttcaataatgtatcggcaagtgtccagtacttcttcctgacttgcagtaagtcctgtgcgcatttcacgtaaaaaattagaggatgaaaaagcatcaggagtttctgataccatcataagaataatttcgcaatctgaatcttttgcctgaccaatagctgattttacagcacaaattgtatcgtcttttaaagtagtaggtataaggaaatttttcataagtatactcttttagtttatacttacaaagtaactcccgtcaaattagaagggtcttaatatgaaattagaattttctaagattcaacattagaagtcttaatgttgcttttcttcgaacttgttttattaaagacaatggttacgatggtgcctttgttttgctctgactgcacctgaatctctccgtcgtgcatgcggatgattttggaagccaatggaagccccaaaccgtatcctatatatttagttgcaattttacctctaaagaaaggttcatacaaatgcggaatgtcttccggagggatcccaatcccgatatcgttgatcgccacctttatccagtcctgattggctgaaagggtaacaaaaacctcattgttatccgagtattttacaccattggtaataatgttgttaatcgcgagttccaaaagtggcttattacaaggtatcaaaagtaaattggagtctttaggcgcaaaattaagtttgatacttacacgattatccggataaatcttatctaaatccgactttacatccattaatacttcgtcgattctggcaatatccaacacctgttttttaccgtcgtaacctgtttgtgtaagtttaagcaaactctctgttaagtttcctaatcgggaagcctggctgtaaatattttcaagggactggatgtattccggaacttccctttctttcaaaagcatgatttcagactctgcaatgattgtcgttataggggtttttaactcgtgtgaagcattattgataaaattggcctgtatttcgaatgaggtttccaaacgatccagcatatcgttgaaagtctctgtaagatctgagatttcatctgaatttttgacttccggcaagcgattgtgaaggttggaagcactaattctatttacttctttagtaattcttgccacaggattaatgactcttttggccaggaaacgtcccaaaaagaaggccaaaaatataaaacctatacctccgaacagcatgatttttaaaatatagattgtggtggtcggtccttttcggtcacgagctccaacaattacaatgtatttttgattattctctgtaaaaacctgtcctaaataatatttgttttctacctcaaaatagtcttttccggtttttaaaatattggtataaaactcattcggtaaattcagttttgtattgtaatcaaaactattggcactgtttatctttagaacaaactcttcttcttcgataagttcttccagtccgttttttttaagattactgtagtattttattttctcaggatcgttctgaaaatgaatggatgcgacaattttagctctgtcttcaagcctttttaagaaatggtaacgattattttctctgaatagaacaaaaacaacaatacatagaagtaatgtactaaaagacgacaaggctacataagtgtatgttattttttttcttatatccattttatggctgtatcacataacccagacctttcatggtatggatgagtttggtttcaaaaggtttatcgattttttttcttaaataagtaatgtatacatcgacaacattggtgttcatatcaaaattaatatcccagacattatctaaaatctgatcgcgggaaacgatgcgaccgctatttttagccagatagtataataatttaaattcttttgcggtcaggataatcgattctccttctctctttactgtctttgcccggccgtttatttctaagtcgccaatggttatagtatctactttttcggtatcctgatgagctcgtcggtgcagtgcattgactctggcatcaagttctccaaacttaaaaggttttaccaaataatcgtcggcccctgcattaagtccggtcacaatattttctgacgttccaagagcggttaacagtaacaccggaacaaaattcttactggcgcgaagtcttctgcaaatctcaattccgttaatatccggaagcattacatccaaaacgacaacatcaaaattataattgtgaatcatctccagagcagttctgccatccagagccacactaacttcattattgttctcggcaaatcctttccgtaaaatggacaacagatttggctcgtcttcgactataagtaatttcatcttagttcaggtatgaatagcaaaaatagggattgactttaaaaatataaatcacactcgttataaattatgatttaattatgaacaacagccccgttttcataaaaaacgactccgaagaatttcttttttatgtgagtgttttttgcgcgttgtaatactggttctttacattaaaactttgtattacctctaagccagacaagtacttacttaatcttttactctttctaagtaaatctaagggattgaattgtatctcagtgatttcttttttccatctttgattaaattaccttttaaataataggtataatcattataaccgttactattgtatttattcccctgcagttagtttgtggtttcttcagattctttggttggaggtggataaaatgacacctttgataaattttgtgtattggtttttcaagaccaattgtactaatccacaccaaaaaaagtgaacattccccaaaaagttagacactatttggggcattttttatggaaagaaaagcaaagtatgactatgcatttagattagaatgtgtagaattggttttaaagaagcactattcagctggatacgtttcaaaattaaagcagactgcaagatggaatattcgtaagtgggtcagtttttataaaaacatatggtgaaattggtttatatccacgaattaatcaaagctattcagcagaatttaagctaatagtactcaaaagcatagaaaaggattctctttccttgattcaggcaggtatacgatttaacattcccaatatttccataattttataatggaaaaaagattttgctaattttggactaacaggattaaaaccaaaacaaagaggcagacccgtatcgatgagtgaccataaagacaaaaagcgtaaatcagacagcccccttataagagagcaggaactgctgaaagaaaacgaaagacttcgctgtgagaatgaactgctaaaaaagcttcaagccttaattcaagccaggaaaaatccaaagccataaacgagctaaggcataaatatggtttggaattacttctgaacctagcagatatggcacgcagcagtttttactatcatcaaaaacaaagtaaatcacctgataaatacagagaaactaaagagctgattaaagccatttatcaaaagcataaagggcgctatggctacagagggataaccgatgagctgcaaaacagaggactgcttatcaatcataagacagttctcagattaatgaatctattagggctaaaaagtattattagagcaaaaaagtataaatcttataaaggtgataatggtaaaatagctccaaatcaaaaatgggcaaccgatataacaaagtttaatgtaagaggaaacaaattatatttatcaccaataattgacttgtttaatcaggaaataatcagctatgaagttacagaacgaccagtgtttaatcaagtagtaatcatgctgaaaaaagcctttagaaaaatcccaaacaatacaaatttgatacttcattctgaccaaggctggcaataccaaatgaaacattaccaagacttattagaacaaaaaaaaatcaaacaaagcatgtcaagaaaaggaaactgtctcgataatgcaattattgaaaacttctttggaatattaaaatctgaaatgttttatacccaaaaattcaaatcaatagagcaattaaaaaaagaaattaatagatacataatctattacaataacgaaagaattaaatcaaatttaaacaaaatgagcccaatacaatatcgagctcattattatcaaacttaattataaatttgtctaaacttttgggttcagttatatatatatatggagtggctttaatttatttctcaattagttcagattataaatctaatttatttgaattatctaatcgtctagctaaaaaagacaaaatagtcaatgaaaaaagcaacgaaaaaggatagaacaacaaaatataattctcatcatgtaccatggttgtcaatattgatagtaacattgatttttgagcaaacaataaagaaattaaatccattagtacaaatattatgaccaatttgaagacaaaattagaacttattaaatttgaaaacaaagacaaaataaaatacattaaaaaagagaatgtgtatatcaaaatactgccaaaaaagttaaagaaaaataattcccaatcattatttttaggtattattaaaaataagagacaattaaaacagttaaaaattatcagtgtgataagataccatttcgtactaaattttattttttctttatattccatctaattaaataaggcattaaaaattacttttttcaaaatataccccctcacaaattaatcttatccaaaaaataatactactccaaacaaaatagccccctaatttttaggagtagaaaaataaatctatatttgtcccaacaaaaaagaaacaaaaaaattaatttatattattatggctaaaattaagttagaatacatttggttagacggatatgaaccaacccaaaatcttagaagtaaaactaaagttgaagagcatgaaaatttcaaaggaacattagaagagctaggaaactggtcatttgatggttcctctactaaacaagccgaaggtggatcttctgactgtcttttggttcctgttgcaatatatccagacccaacccgtatcaacggatggttagtaatgtcagaagttatgtatgctgacggaaaaccacacccttctaacggtagagctacaattgatgatgataatgatgatttttggttcggatttgaacaagagtattttatcatggataccaaaactcaacttccacttggattcccggttggaggttaccctgctccacaaggaatgtactactgctcagtaggtggaaaaaatactcatggaagaaaattagtcgaagagcatgctgatctttgtatcgcagccggaattaattttgaaggaatcaatcaggaagttgcctgcggacaatgggaattccaattattcgctaaaggtgctaaaaaagccggagacgaaatctgggttgctcgttacttattagatcgtttgactgaaaaatacggttactatattgaataccaccctaaaccacttggagacacagactggaatggttcaggtatgcatgctaacttctctaacgaagtattaagaacatgtggagaccaggctacttacgaaagaatctgtgaagctttcagacctgttactgcagagcacattgcagtttatggagcttacaacgaccaacgtttaaccggaaaacatgaaaccgcttctattcacgatttctcttacggtgtttcagacagaggatgctctatcagaatcccattaatgaccgtacaaaaaggatggaaaggctggctagaagacagaagacctgcttcaaacggtgatccttataaaattgctgcaagaattatcaaaactgtaaaatcagcattgtaattcagctttagaacatatacaaaagtgctaacgtaatgttggcactttttttttatagtattgtctgtcctttcagtcgaaaagaacagactttgtataaattttgaaagtcacttttttaacacttaactctctgattctgtccgaaaatgtcagacagcataaataattataattgatataatttaaaaactatctttgtaaatcactaaaaaagtatcctaatggtttggattttcttcttaatagctgttgcacttattctcgctttagacttaggcgttttcaacaaaaacccacatatcataagtactaaggaagcaagtaaatggacattgatctgggtaaccctatcctttcttttttcaggagttatttattggctctatactacagattacatcgcaaatcctgacaatctgaaacccgccgttgcttccatgaagttcataaccggttatctgattgagttatccttaagtgtggacaatatttttgtgatcgccattatttttgcatcgttcaaaataccacaaaaataccagcatcgtgttttattctggggaattctgggcgctgttgttttccgtggactaatgattttctttggtgtaatgctgattaataaatttgcatggactacttatttatttggagcctttctgctttttaccgccatcaagatgttgtttacgggcgaagatgaagattttcagcccaaggattctttcatttataaaacattaggaaaaataatcccgatcacttcccatatggagggagaaaagtttttcattcccacaaaaacagccaaaaaagcggccactccattatttgtagcgctgattgtgatcgaattcatggatgtgctttttgccgtagacagcgtaccggctattctggctattacttctgatccttttctagtgttcagttctaatatttttgccatactgggattgcgttcgatgtactttttcttagccaatatgctcgcaaaattcagctatctggaatacagtcttatcgctattttaagtttcgtaggattaaaaatgctgcttcacgatttcattcacgtaccggaatgggcatctttagtcttcattgctctttcacttttagccggtattctggtttcgttaaaatttggagcagaaaaagaacttactgatacgaataaggaataacatttaaataaaaatagtttcaataaaaaaaggagatcgtcagatctcctttttattttatacttcaatgattagtttagtttcttaaccttactatcatcaatattgtattttttaataacagcattgtaatctgagtaatctgctttatttactgatttaccagtacttgaaaacgctcccggcacaattacaattctaaaggtttgattttttataaactcaggcgttaaagctaaatcatagtttcctcctgcaaaaatggtgaaatcgcttttactgaaatcgaaatcataatcgaaatcgccttttgatgtataaacggttcttggaatttgctgccagatcggagtagttggattaactgttcccgccaatctgtaaattaaaatcacatcagaatcaaaaattaccggattcagtttttgatagatattataaccgtctgtagcgttgtaagaaaaattaacattttgaagttcaaaaacttctgcaaccggtccttctggtcctcgtggcccatccaatcctggaggtccttctggtccttcacaactagaaaatccgattagtccaacgactgctactgcgaatagggtaagtatctttttcataatttctgtggtattatttgtttttagaatatatatataaaggtattccaaaaatcaaaccaaaaaaaacatttgataccgttcttatccgatttttctattatttttttataacctgctgatttttaagtagtattttattaaaaaataaaacgtgatagggtagtgaattctcccaatactcccaggtatgcgctcctgcacgttcggtataatcgtgatctactttgttgtaaaccaatctttgatgtagttctctgttgggttctatcaaaaaatcatctacgccacaatctataatcaaagggagtttatttgctttaagtttgtccaacattcccagtacagcatattgtgcatacatttcagaattgtcacttttatccccaaatacaggctgcattaatttcaccacctgtgccgatgcatccctctgtaacattactcccatatctactgccccactcatacttccggcagcacaaaacaaatcaggatgcttggccgacaaatacaaagcgccgtgacctcccatagaaagtcccgtgattacccttccgctcctgttgcttatggttcggtatgttttatctactttttgaacgacctcttgtgtgataaaggtttcgaactgacttcctttgtttaccggactatccagataaaaactaaacgtttctccttcaggcatgactatgatcatattgtactgatcggataaattttgcactaatttcttattgggcgtgtttttcagccagtcgctaaaatgtccgtaagcaccatgcagtaaatacattaccggaaatgccgttttgcttttggcatacgaattaggcaaaacgaccgccgctttataggttttactcatggctgtactcgcaacttgcagggtatcaacttttgcggcataacttgcggcattgatacataacagcactacaatcaatagaaatctggcatttttcatacttgtaacattttttgtttttagaggataaaagatattacttttttcttctagaattttctttttctaaaaaaagtgtgaattattactatttcaatcaataatcaggcgatacccctgagctcttatattgatgatactgattttggaatcctcagaaagatttttccgtagttttgaaataaatacatctaagcttcttccattaaaaaaactatcatccccccaaagctcaataagcgtttcttttcttgggagcattctgttttcactggtaacaagacgataaagtatttctcctgatcgtggagaaagtgtaatcattctttttttgtgaattaatttatagctctctggatcatattcataatcgccaataacgatacttttctttttatgttcatcaacagcaggaaaattcctgatcaagagccttttgattctggcagtgagctcttctacactgaacggttttcggatataatcatctgcgcctagtgagaagccctgcagcacatcctctgtcaacactcgtgccgaaagaaggatcagtggaatagtatttccatcttctctgatttgcttcaataaagaataaccgtcaagctttggcatcatgatatctgctacaacaaggtcaaacgattgctcttttagtacttcaagtccatcgacgccatcaactacccatagtacttcaaatccttttttttccagcagaattgaagtgatctctcccagatcaaaatcgtcttctaagtataatattttaggcttactcataagcaggtattttgatttcgattagagttccttctgttttttgtttcaaaaccttaatactcccaccttgttttttcaaggactcacgcacaaaactcaatcctaaaccgaatccttttacattatgagtgtcatcattcatgattttaaaataaggtgcaaaaatttcttctctgtatttttcaggaataccaataccgttgtcctgaattctgatagtcacagtattgttcattttccccgcggaaattataattctgggatccctttcagaatatttcagagcgttatcaaataaattcagaaatatttgtttcagctgaatccgactgcccttgatctgcaaatttttatccacatcttcaaaaacaatttctgccttttttttcaaaacaatatgagctaaatcctctcctgcttccttcactaaagatagtaaattcaaggaagacaaaattaattgctccttactattactgcttctcgcatgctgaagaatagaatccaccagaagagaaagctgatcggctgctctatgaatggccgctgcatatttttttacatttgcaggttcttcttctactttagaggtttccagcgcttctgttgcaatcagtatcgttgaaatgggtattttcagttcatgcgtcatgttgcgcgtgaaaatttccttattctgcaataaattccgattgaaaatcaaacttctgaaaagaatgaaaatagtgatcagaaaaagaaaaacataaaatatcgaaaaaaatataatttcttttatttcgtaaattacaacacctgccatattaacaatatgaattcggtatttgttattctcttgtacaaatgagtttattgttttcgtagtgttctggtctgtaatcacaatccctttgggataggttcttttaacgttcttaccttcaaaataaacttgaatttcagcctcttttttcaggaatgctttcaatctctttctaaccgaagtatacaaaaagtagtcaagcttttcatgctgataaagcaatccggtattggaaacttttaaatactgcttaaccacctctacttttggttccgaaacaaatacctcaacttttttggttttagatttgtttgccttttcaattttttgctttaaagcaggttccttaaacaaattcataagcaatatctgagtagcttcagattgcgttcgctccagaatttcacgttttttattttcataattcaccctaatccaatacccctgaaaagtcaaaacaacaagaatggtcaggatgaataatggttttccaaaactaacaaagaatttattcatacaatcttcttttaattacttcgaaattacacattaacaaggaactataaaagctgtgataacactatttaacagtatataacagtctgataacctacattctaatgtcagttcccgagatttgccaaagaaaaattaagttatcaatatttttttttactgaaatagaatcgattaaactttaaaacaagtgcattatgaatatgaatcttaaagtcttaactgctgtatgtattgtcatatcagcaattacagcaaatgcgcaaagtactgcgacaaaactaccgggtgatccgacgttgccttcttccaaagaaagtcttgagaagatggtctcttttgataaaggaaatttcaaatacaaggtagaagattatttcgcaaaaccaaatgcttcgtctttcaaaatttcaccagatggacaatacttgtcttataaagaaaaagataaagacaaaaaaaatcatgtgtatgtaaaagaactgaaaacaggaaaaattacaaaagctattgtagaaaaagaggatcttattggaagttatggctggctggacaagaaaagactattttatacacaagataaaggaggtaacgaaaataaccatctttatgctgtagatattgatggtaaaaatgtaaaagacctaaccccttttgagggagtaaccttaatgtacgctaatatcatcaaggacactgaattcgttattgtaacactcaataaaaacaacaaacaaatctttgaaccctacaaaataaacttcaataccggagagatgactcagctttatgaaaataaaaacattagcaaccctatcaatagttatctttttgataaagaaggaaatatgagaggctataccgttctggaaaatggtgtaaccactaaaacatactataaagatttagaaacaggcaaatttaaccttatccaatcaacagactggaaaaataccttcagtattatcgaactgaatgataattctaaaaataaggatgaagcctatgtagtgaccaaccttgatagcgacaaagaaagaattgtattatacgacctgaagaaaaatacaattattaaagaagtttattcagaccccgtttatgatgtaagctccataaataccgcccgtaaaaacagaaactatgaactggattacattagctatactggcgtaaaaggaataactataccggtaagtaagttttataaagaggtttacagtaaactgtcctcacaatttaaagataaggatttctcaattgcatcttcggataacaatgaaagcaaacttttagttttcgtaacaagcgataaactctatggaaagttttatgaatatgataccaaaacaaaaaacataaaattgctttatgaccttatgccccagctgaaagaagaagatatggctgaaatgagacctattgaatttaaaagcagagacggtttaaccattcacggatatattacattacctaaagccgctttagaaggaaagaaagtccctttgattgttaatcctcacggagggccacaaacgattagagatgattggggttttaatcctgaagcacaattgtttgccagtagaggatatgctacattacaagttaattttagaatttccggtggatatgggaaagaatttcaagaatccggctataaacaaattggaagaaaagtaatggatgatgtagaagacggagtaaaatatgtaataaaacaagggtgggtcgatcaaagtaaagtggccatttacggaggaagccatggaggatacgctactttaatgggattaataaaaacacccgatttatattcctgtggagtagattatgtaggggtttccaatatttttaccttttttaactcgtttccggaatactggaagccttacaaagagcaactaaaagaaatatggtatgatttggataatccgaaggaagctgaaatagctaaagaagtttctccaatatttcagatcgataaaatcaaaaaacctttatttgtagtacagggagcaaatgatccgagagtaaatatcaatgaatctgatcagatcgttaaagcgatgcgtgcaaaaggttttgaagttccgtatatggtaaaatacgatgaaggacatgggtttcataaagaaccaagcagaatagaactctataaatacatgttaggcttctttgctgaaaacttcaataagtagaaattccacaaggagacacaacagaattccacaaagagacacaaaagacacgcagagatgcacaaaagattaaaaaacttcgtgtatctctgtgctttttttcgcgagtctctgtgcaacaacagaattccacaaagagacacaaaagacacgcagagatacgcaaagacttaaaaaaactttgtgtatctctgtgcgatttcttcgcgagtctctgtgcaacaacagaattccacaaagagacacaaaggacacgcagagatacacaaaagattaaaaaacttcgtttatctctgtgctttttttcgcgagtctctgtgtgatttcttcacgagtctctgtgcaactacaaaacttttactgaatgacaattttatgttcattgcggtattgcgatgcacttttaccggtgtactgtttaaaagatttactgaaatgactaaaattattaaaaccactttcataacaaacttcattgatacttataggtttttctgccagaagctttgaagcatgtaccaaacggtattcgtttacaaattcggtaaaggttttattggagatttttttaaagtaacgacaaaaagaaggtgttgtcatacttatcagattcgaaacttcatcgatggcaattgattcctgaaaatgatctttcacataattaaagattacattcattcgatcattatcctgagtctgcaattctaacgaaaaaccatccgcatttagtactgtatattcttctgatgaatctaactcatccaaaatacttaaaagtgtaagtaaacgttcaaacggaagctgattttccatcatctcgattcttttacctacatttttcttcgtttctcctccaaaagcgattcctccttttgactgattcaaaacatttcgaacttttttcatttcgggtgctacaaaaaaatcattgcccaaaaattcaggtttaatatgaatgaccgtttcatctgtatttcccgtcatttcattcgtaaaaccacaatgtggcaggttggcccctatcaaaagtaaactaccattggtgtaatacgaaacatggcttcctatttgtcttttacctgctcccccattgatgtaaaccaactcaatttcgggatgataatgccataaatgcgccttactgttcgttttttccgcatgtttggtatacgtaaaagaacttccgtaagaattagatatcacttcaagagcaggggcaatcgtcttcatgataaagtttttagaaaataatagcgaatttaacaaaaacacctaacataattcatattttaacctataacggtttcgcaaatgagaatatatcataaaaatccaaaaaacactaaattcaaaatcacaattattcccgtattttttttatactcgttttttttctaatcttttttttaatatatcccatttaatcgggtctttttataagcatacaatatatatgtaagaattataggcgcattcagagattgtccaaaattttaaatcattgaaaaataacaacacaattaacaaaaacacctataataatttaaaatttaacctataacggtttcgtaaatgagaatacagcacataaattagcaaatagagttgcgaaaaaaaatcctgctctaaagtaatttagcttcagagaaatgaacgaatcatttaaaacgaaaagctatgaaaaacattttaaaattaagtttagtctgtgcggtactcttttcaggaataagcacttatgcaattgatgaaaatggtaacaacaatcttaaccttcacgtattaaagggtaatggaaagctaattacgtttgctctaaaccaggtgcaaaaagccagtttgagtatttatgatcaaaacggttcattaatctacactgaaaatgcttcaggtaaagaaggaattttaagaacctttagtttagaagaatttccggaaggaacctatttcttagaagtagaagacagcgttaaaaagataagacatgaaattacaattacagatgacaaatcaatattatctgcaaaagcaatttcatctacctataaagcagatttctctgctcaaaattcaaacgtagcagtacgttaaaaaagtttatgctttcataaagtataaaaatgaggttagatagttagtaaagtaaaaacgtgattgttttaaaacagctctttgtggttattgagctgtttttttttgcttataaactaacgagattaaccgcaaggtgcgcaaagtttttttcatatcttttttatacaaacgcaaagttcgcaaagcttattagcgtaaaatccttgcgaactttgcggttactacacgtaatttgtgataaaaaacttcacgcaccctgcggttaaatcctaaaacacacattttgtaagaaagacaggcgaaaccacattgccttaactttatcaaaacattaaaatataatcgcagaattaacactaacacttaaaataattcaaattttaacctataacggtttcgtaaatgagaatatagcatagaaataagaaaacagagttgtgagaaaatcactatttcataagtaatttagcatcagataattagaattattaatctaaaaactaaaagtcatgaaaaagattttaaaattaagtttagtatgtgcagtacttttcactggaatgagtacatatgcaattgacgggaatgaagattttaatcttcatgtattaaaagccaacggaaagctaattgcatttgcccttaacaaagtgcaaaaagcaaacctgacaatttatgataaagacggtagcttactttatactgaaaatgcatcaggtaaagatggaattttgagaacttttaatctggaagaactcccagcaggaacctactttctggaagttgaggataacatcaaaaaagtaagacatgaaattactattactgaagctactacggtactttcaagaaaagcaatttcatcgagttataaagcaggtttttctgctaaaaaaactagtgtcgctgcacgttaaaaattttacccccttacccaaaaaagcgaatttatttagttagtgaaaatagtacgttttaaacagctctttgtcgtaattgagctgtttttttatgtctttctctcatctcaaaaaactgatttttatatttttagaaaaatattcttaataattataaaagagtagtttacacactcaaaaaaaaactcaaaataaaaacatccgtcatcccagtaaatacgtacatagttcacataaaacacagaaacatctttaattcagcaatttagccattgaaaaaagtgacttttttgtataaaattagatttctatttgtagttttacgcgtttcgaaaatagtaataaacaattaaaaaaaaatgacaaatttaacgaaggtgggcttagttgttgccgtatttttaacaacaatctttacgtatgcaattgatggaaaaggagattatattttaaatataaaaaccggaaatggaaaagtagttagttttactttaaactctgttgagaaatcagtttttactatctatgacgaaaacaataatttggtttacacaggagaaactgcttcaaaccagttagaaacgtcaaaaactttaagtttagaggcatatcctgccggaacttatatcctggaagtaaaagaaaatggtaaagttgctaaacatgaaattacggtttctgctaagaaatcaaaaactgttaagatggacgaatcagtgaacaaaagccctgctttccgacgctaattgtttttacttaaaattgaaaagcatcagctgtggctggtgctttttttttttaaactaaaccactctgcactgaaagtgcagaggtttgttttacgagggactgaaagtccctcttcttatttcattcacatttccgggaaaacgacgaacaaaattattccggtggtggatgatgctttccgataacataaatagcagggcaacaataccaatactaaaaagaaaagttatcgaaatagcactggccagtacagcaggttttgaaattaggtgcacttttggcacccctacggccaatagcaggatacctgctgctgccagcattatgaaaactgcattaaaaaagaaatgttctttccatcccagtttttcaaggatacctccacaggaacaaggaacaaaagaactgtaatttaaaataatatagatgtaggtggtaaacataaccattaggctaaaagcgcagaaaagaccaattatcctgtatttttttaatgcaatcaatagtgcaatcaataattcaactgcaggcacaatccatgcaatcgaaccggcaaaggcacttaataatggggattgtcccaattgcacgcggaagttttcaaaatcaagcaatttacttattgcggcatacacaaatagtaggatatataataagcaaattatataaaccattgtttttttaatagatatagatattttcatgtcttcacttttaaggttttaacgaatcattgacagtgagatacaggcgtacgaaatcagcttaacttatacgatgtaagaacaactaattattacattttaaatgttttataggtgctaaattaagtcgatatctttgaagggttgttgtcaaaaacgatgtaaagcttatcaaaaacggattattatattctttaagcattattcagcctgcaaagggaaagcaatatgccaaaagtctggatgaaaaaaataaaactgataaaattgatgcttctatgctagcgcgcatgggattggagcgccagcttacaccgtggaatcgtcccaatgagaaaggctttatatttggcaggagtgtgttctattatccacaacaaaaacctaagaacctatttcaatcagttaaaggataagggaaaaccgggcaagacggggattgttgctttagaaaggaaattacttgttcttatttacacgctttacaaaaatgagcaggattatattactgattataacagcggcattgaagtttgtaatgtttttactgagagtacagaaaaaaatactcctcttaaaaagtaagcagcccgcaaaaatcgggctgtagtagatggtctttgccctttgacaggcataacctctatgatagacaaatataattatttttgacggaatttatatgttcggacttatatccccggcggacgtctttttttcttttttttcttcttgaagtcactaatctgatcttccatattctcatacattaaaggatcggaagaagaaagaatatccaatagaccttctgtggagaaaccaatctcagaggtgagctgttccagttccgaactattattttggaaaataccctttgtcctatcagggaaaatgggcctctctgtatcagtggggctgttttggagctgatccagtaaatgaatttcgcgtttctgctcaggactgccatttttcatggtcagggcatagttcatggtgtcttttagcagccggtcaaaaccaaacatctggtcaaaaatcagttcccctgaacctttaaaagagacccggtcaaactgcccgagtctggcggaatgttctttattactgccccgtgaattgttcatcggactgagcttgattttgtttgaactgtcttttcggctgacaatgacctgtacatgcatttgttcccctgtctttagttctcctgcttttacgattccttgttctacctccggatccctatagttgtaatagcggtaacgttccagtttgccgtaccataacagatttttgctgtcctgtataccggggcgtttaaaattacgggcatacgcatccataacacagacagcatactcttttagtttctcttgggcaccttgatccccgaaacgttcctttagataggtaatttctttttggcttggactgatattgacaagataaaactttgcatcattgcggcctagcttggctatgttgttatcaattcttaccttgacttcctgtaggatgatctcgctgcttatggtattgaaccataattcctttgcgtggccgttttcaagggctgcgtggttttccttttccagatagtttaccagctgtcccgagcttcctttgttgttcccagtctcagaatccgtaatgttgatgtacatgatgctataggtttttgagtgactgccttacgtgtgctataagttcttctttctttgtgccggctgtagtccagcccatttcttcacgctggtttatataataatccaacaattgaccaaactgtactttgagcagttctttctccttatgtactgaagccaaatgcttgaggccatttaaaatctgttcgctccgtttggtaagaacagtggtcttctcactttcggctaaaagatgcctgcctattccttcgagaatttccatctgtctggaagaaacggtttttaaattagctgaatcggtaaacaacggcaggagaaaatccttctcctgctggcggataaaagacaggatacggctgatgcccgaagacagctcacgcttgagcatttcatcgccggggtctgccggatctttcttgcttcggtaaaagtaatccgccatctggcagaagagttcctttttgcttcgcccaaggcttttagacaacttctgtatcttatcatctgtttctttgggatagcggatactgttggtatctctctctttcataatatcctattttgtaaatccaaatcattcattttttaagtaccggtataccctcaggtataccttttgccctatatcgacaagccccaaaggctgtggatatacccagagtatacccaaaaaccccgcagcctcagcaaaggggcaagcgagtagggctctgctcaactcccgcttgcttttttcaaaacatattaaaaacgcaataaaatctttacaaagtaaagacaggatggtaaaaagagtataatgtgtagtattgccaaagactgccgccaaatgccatagagagcctttagtcttaataaagcgtatattattggtctgccttgctaaaaagaggggggaattaggtttttgtaatagtatcctgctatagtcccgcgacagctttaaattaaagtcagtatgcaaagtatttaagaatcgctctgtctgaaacagatttttaaataccacatgatatttcaagttgttaaatatcaatcgcatataagcagtcggcccttttaagcgtctgaaacccttagtaacaataatttaaaatttattgttattatgaaacgtaaaaaaagtaagagaacttttctaccgggtaaaagcctaatgggtatgaaaaaaaagcgtaagcccgaaaaaaagggcaaaatcaggaaaaacacaggaaatatactgctgactcgtatatatcctctggtgaggttagttattgatatttataactacttcaattagaatttaaaaccgagaagcttgtcataatcgataagcttctcttaatttaaaccttttgatattgaccaaaattcgatttaaactcatgctgtattatttcaatatgcgtaaataatgccagtgtaaaatagtatatttcatcaaaagaaactgatttatatccttttcatttttgaattagtataaggaatattactgaaactaattttaaaaggaggtattatcggaatccttttcgataattaagaataggaataaatttggcagccatgaaggctgcccgcgagtggctttatagctcaaaagattatatgatagataggatgcaatcttatacaacatcctgaaataatgcagacgtgttccagtcatattgataactgtcaggaatatagattaccggaacggtaacttatatatttacatattcatgtacttgcgtagctacgtatttgcatagctatatatgtacgtagctatatataaacgcatgcattcgcggattcaagcactctttcatgtatttgtgacttcatgtatgcattcatgcaagcttgcaagcctgtagctatgcagccatgcacacacgcctgcaagtctgcaagcttgcactactatatataagtaaattttaaaggctaattgtacatgtatgcagattgaaatattcacatgtgcttttaaaactataaagttataaaaatgctttagcagagattggcagtagaagttccaataaaaatatataattccaaaagaaaacagaaaaaccgaaaaaaagaaaaagaaagcaattctacaggacgggttgtgggcaggccaaaaggaaacggaataagtcccgtaagggtggattgcgagaatacgagcaagacattatgccgtaagcttttggttagccaaacaacccgccctaacttcgttttctttttattatttctttggataaaatataaagcccagctagtcccaaaccggacatacccaaccaatgaaaaccttaaagcgccttaaagcgaaacctgaaaagtataataattaccttcttccttaaaatcaaagatcatgaaaaaagataagcataagggcaaagctaagaaagaaaagaaaaaaactgttattgagccaaaacctgaagaggtaaaaaagaatgaaattaaaaaaacgagcaatagaaagagaaacccgtttattcagatggacagaggcggaaacatttttaccaattttttctcgaattttttcagacagcttagaaaccccacaaaaactggactgcccaaactattagacaaactgctggttattaaaattgaagaaagtgaaaagaagtctgcacggaaacctgaaaagcctttggacataatgggttcggtaaaaacggttttacattatgtaaacaacagcgggaataataatttaagcccaagtgaaaaagaatcgctgagacaacgtacaaaccagcctttagatattgccgttaagatggaacagaataaagaagagcagataaatgaaccaaaaagaaaacgtttaggcatgtagttctagtttttccagcagactaaaaaacaggcagaaaaacccatctgaacactataactatatccagtgatagggtttgtccttatgtggtttgaagactgtaatatttttttctaaaccaaaaagcgacatttaccagagcaattaaggcaggtacttctactaatggaccaacaacaccggcaaaagcctgtccgctgttaataccaaatacacctatggcaactgcaatggctaattcaaaattattaccggttgcagtaaatgcaatggcagttgactttgaataatcggcaccaaaatattttccaatgaaaaaactgattacaaacatcactacaaaataaattactaatggaattgcaatacgcactacatccattgggatctgtataataagctctcctttcaggctaaacatcaatactatagtaaacagcagtgctataagcgttattggggaaataaaagggatgtatttattttgaaaccattcctctcctttcagtttgattaaaccgtaacggctaattattccaagcgcaaaagggattcctaaataaatgccgacactttctgcaatttggtcaatgctgatatttacattgaagcctgtatatccaaaataaggaggtaaaatggttataaatacataagcatacacgctgtaaagaaatacctgaaaaatactgtttaaagcaattaatcctgctgcatattctctgttgccgtcagctaaatcattccataccactaccatggcgatacagcgtgctaatccgattaagattactccaatcatgtattcaggataaccttttaagcatagtaatgccaatacaaacattaaaattggaccgacaatccaatttaggaataaggatgctcccaatacttttgtgtttttgaacacttctcccatttgttcgtattttacttttgccagtggagggtacatcataagaattaacccaatcgccaagggaatgttagtagttccgcttgaaaacgaattaataaatccactacttgatggtattaaatatcctactatgacgcctataatcatggcgagaaatatccaaagggtcaaaaactgatcaagaaaacctaatttttttctttctaatgctggtgcacaattatttaccgacatacttattttttaatttgtgagaatacataaaacatttcagttccgatttgaagactgcgctccttgtatatttcttcctgctgtggtgtgttatcagaaacttttggatcttcaaaagtgattgggatacgtttctctgcgcctggaataaatggacagcctccatcggcttgtgaacaggtcatgatagctgcaaattcacctttcggattaaattcatcatcgtaggttttggagaagccgattattggattttcattttctccatattttatgaagtaaacaggattgcttccttcagcaatggtattgactttaaacccttgttgtattagtgtcgtagctaccataggaaagagtgctgtagcttctgtacctccagaataacaaaatacatttttgatattataatagttagctgctgtctgtgcccaaacttgagacaaatggcttcttctggaattatgggtacaaatcaaattaagtcgtacttcctgttgattggttattttggcttgaataaattcgattaatggctgtaatgtttgctttctgtcttgggtcaggtaaccaaaagataaagaatcaattgtttttgttaaatctgcgtacattcttatttctttttaaaattacaaaaaatgaagttctgtaccgtttcaaatggagtatgatgattttctgtaaaacattcagttttatcaaaagtatcggaaaaaatcaactcaagttttgattcggaatattgcgttatttccaatccactgcattttaaaggaccggattctgaaaaagttcccataaaaagattggctttttctgttgtagatttctcaacaattgctttatatgcttttatttcctctttggaagttaaaaagtggaatgaagcccggtcatgccaaaaatcaaatgcctcttcgggtttaaaatccaaaatatccgaaacaataaacgttacatattgagatttctcacctaaacgatttttgatccggttaatggcattttctgaaatatccaaaagaaaaagattagtatatcctaattcaatcaatttatcagtcaggtagctgtcaccgcctccaatatcaataatttttgcgtttttttgtaaattagcttttaaaataccatttacagaagtttcaggatttgtttgataccagcttacttcagtttcttttttggtggaaaagacgttttcccaatgttcttttttactcataggtgtttgtgttaacaacagttcccatcaggagcacaacaaggctcactgtttttatctgataatcttactttttgcttttcagcgggaataccgcaattgtcctgagctaggcaagcagtctgtttatttaataaaatgaagtttttaccattaaagtctagatcatacttaccaatggtggtgtcctgatattccacttcaatttcatgatcttcaatgcccaaaactttttctgaaagctcaataatatgaatcagcttttgaggcttaagtcggtgttcgtaatcattggcatcccaaagctggaagtttacaacgttttcctttcttacagtaccaccgcaatcaataaagtttttagttatcaaaccaacttcggttacgtggaaatattccgggacaaaagttccgtttggcagttcaaagtttacagcttcaaccttcgttagtacttctttaatttgtgaaagtttcataatatatgtattttaaaaagttaacagcaatcatttttctttttctcaagatgactgcttatgtgttcaaaaaaacctttaattttctctaagccaggctcattaatacaatagcagatagaattgccatctatacttcctttaattaaaccagcgtttttaagctccttaagatgttgtgatactgttggctgagaaagaggcaattcatttactatatccccgcaaatacaggtatcaacctttaaaaggtattccattatggctattcgggcaggatgtcctagtgctttagccaaaactgcaagttcgttttgattgtctgtaaagtgatctgttttagtagctcccatcgttttatatttatattgcaatattacgataaatattttgataaaaaaattaaaataaatttttatgcttcctttttgaaaaagtgccaaaaaaaagtctttaaatattcatgtttaaagacttttcacttttaaagagaaaacttaaattcctctgaaataataactatatccagtgatagggtttgtccttgcggttgagatagcagtacatttcttcctttttaagttccggaaagaatttaagggcatcttcaattgcatagttaggcagaaagtaaatctcttcacggatagccttaattactttttcacgaccataaaagtggacgatctcgtcaatttcattctggccaccacgctctacaatacgagcaatgacagcaagataggctttctgccaatctaatttgtcaatttttgtatcccaaaagaatttgggatgcaggctgggtatctgtttgtgcgtttctgactttttcatactataaatttaatgatttttaatgatttaaacaacgtttttaccttcgaaaatcccttcctttcttgggattttcaattttattgtcctggttctgaattgcgaatttcagctctggatcagcgacagctttttttagacgttcagacatctttatccagtttttctcttttcctttaaccattgaaacatcgtattcttgattgatatttccaaaataactaagggcatgctttgcccaaaaggcatctccttcgtattttctttcataagcctgaagatagaatttcaggggattgtgttccagaagaaaatacatatccacaaaatcttttaacctttgtccgttttgaaaaattgcatggagtttcatagctccaatatcttcattggaaatcatacggattccttctgtattttcaacaggattcagaagagggtatttgtgggttacaatatcaactttgatatcatcgatgtaggtaagaactgtattgttgtatgttctgctttccttttcatctgcaccataagtatcatgcagatatctgagcatcatctgcgggttaaaatcttctgttataaaaagatctatatccactgataaacgatgtcctattcgtaaagagagtactgtacctccaaccagtacatattctttcaatttttcatctttcataagcttttgcagaagttcccacatctgaccgctgactgtttctttgtaaagcataatttcatgtttttcatgaaattaatttcgaaaagaggatgttcttacaaagtgtcctgtgatggttgtgtttggctatgaatgtctaaagtaaatccaaagcgacataataaaccaaatgcttccacatcctgtaatatcagggtatacaatcaattcaaagtagaaaagaaaaaagcaagttttgtttctcaaaaaatgataagaatggccaatgatagccaaaaaaaacctttcaaagcctcagcatcttaatacgtgtttcttcctaataaatttagtcagacagacgatgttaactagtaattatgcagaggtatgaatgatcttaagttaaaaaaaatatcgacagaagaagcattccaaagaatgaaagatgctggaatggaagtaacatacgaggaagttattttaataatggaattcctatatgttttaacgtattttgttgttagaaagcactttaaactcccttagtttgcttatctttatgccgttaaaaatcaatgttggcagttgtcaataaaatattctatgctatgaaaagagcaattttatatatcagggtttcaactgatgaacaggcagacaaaggatactcacaacgtgaccaggatgagcgcctgcgccggtattgtaataatcaaaatatacagattgataaagtaatttttgaagatcattctgcaaaatcctttaaacggccagaatgggagcgtctgcttgaaggagttaaaaaacgcacggcaagaccagactatatactttttacaaagtgggatcgcttcagcaggaatgccggagatgcttatcagatgattaatctgcttaatagcttaggtattgaaccgcaggctgttgagcaaccacttgatttatccgttcctgaaaacaaaatgatgcttgcaatatatttggctgctcccgaagttgaaaatgacaggcgtgctttaaacacattttatggaatgcgacgtgctaaaaaagaaggcagggttttaggtatggctccatttggttatataaatcgaacaacagagaacggtaaaaaatatattgccattaagcaacctgaggcgagcaatatacaatgggcgtttaaagaaatggctaaaggtattctggctgtggatcaggtacgtcaggcaattaataagagaggcaaacagattagcaaaagtgcttttcatgtatctcttcgcaatgctgtttactgtggcaaagtcttcattcaaaaacataaggatgaggaggcacattttgtagagggtcaacatgaaccattaatttcagaagcactgttttataaggttcagaatatcattgatggaaatatacgtcaaaaacgcccgcaaactaaaatttcatctgacgacaacttacccctacgagggtttttaatatgccccgagtgtggtaggaatctgactggcagcgcttcaaaaggttcaaaaggaggttattactactattaccattgcattccaaagtgcggctttagaaaaagtgccgttaaggcaaatcaaatctttcaggacaatttggagaaatacgaatttccgattgttattcaggaaatcttacatgaagttatgatgatcaactacaaaagctttggatctgttttcgacaatagacgtggtgccatcgcgttggaaattgacagattcaatgcaaaactttcaaaggcaagagatctgctttttgatgagaaactagatgcagatgattacagagaaatcaaagaggaatgtaaaaaaaacattgaggctttagaggaagaactatccgcattaatgtcagaacaaaaaaatctcaatataaagagaaatcttgaatctgcactaaatgtgctttctaagctgtcaaatgtctataaagaaggagatatagagactaagcgacaaattataggttcgatatatcctgaaaaactgctttttgacggaagcacgtatcgaaccccaagagtaaatgttgttgcacagtctattttgttgattaataaggctttattagataaaaaaaaccgaacaaataagtcgttatcttatttgtccggtcttgtagcgggaacaggactcgaacctgtgtccgccgcggcggatatgagcccgccagtttttgctttgaaataaaaaaaaacaccacttgttgaagtggtgttttacttagtagcgggaacaggactcgaacctgtgaccttcgggttatgagcccgacgagctgcctactgctctatcccgcgatgtttcgggtgcaaagatacgaattattgcaataagagaattgttaatagaaaatgcagttgataataataaccagattatagaaaaataaacatttctaaatcttagtccaaaaggagaagaaatagttaaaaatccaatgattaaggaaattataaatgaagttgaaagtttgtctgctgggttatatttattgatgtatatatagtagaatattacaattatgtacaaaaatagatatattaaatctgaaagaattagttttctaatttctaattttccaataataaatttcctattcattgatttttctatctattatggatataattggagaactatttctttgtcatcacaaatttctctgaacttggtttaccgtttaaatttccggaaatctcagcagttaaagtattattcgctccttttgtataggttattttttgcggataatcgtgtttcggattttcaaaaaccaattgtttgtctgattcagcagtcgattgaaaagccaccggtttatcatcattttgacctttcaccgtggcaaaataggttaaggtttcttctttttgagataacacgatgttttcgaaatgaatagtatctttttctttaatgaaataagaggcagcactaaaagtactgtcatttaatttttgccaattttcagtcagaataccgtccggagatttgttttcccagtttcctattaaccagtccgcgactttgattttatctttctcggcagaatctttcttctggcaggaaacagcagcaattaaaagcactgaaagggtaattttttgaaacatatctatacgttttggtgttaaatcgaaaggctaaagtatgaaaaagaatggtttgttttaaaaagtgagatgtgaaatgtgaaaagtaaaaagtaaaatggtaacgcatttcagatttaacgtctaatgtctaaaatctaacatttcagaaaattcacatctaacaaaattcacaaagaatcgaatataccaattcctttgttggtttctgatcttttaatttggctcgtacatcgtcaaaagtaactttaaaatcacaacctgatttgtattcactacagccgtaggccgttttacccttgagaattgttcctttttgacattttggacacgttaaggcatcagatgctgctgtctctgattttgctttcggagtggttttcttcgtctctaatttaagtttgtaattttcttcaaagcgaatcaaaccttcaacagttccttcttcggttttaaacccttttatgtttacagtagatcctttctgaaccaatcttaaatattgattttcggatattttcttctctgcaaaagtataaggcagcagaaaatcacaacccgatttataattaccgcacccaaaagctgattttccttttattaaagtagctttttggcattttggacaggtttcggctaaaattcccgcggctttctttttctctgcttttacaactggtttttcaactgttgctgcatgcgaaatattagcatgtctggtttcgcttcgtacttcggtgaccaaagcttctaccatttgtttcatgtttttaataaaagctcctgcagtaaaagttcctttttcgatatctttcagttgcttttcccaggaacctgttagctcagccgatttgataagttcgttctgaatcgtatcaattagctgaattcccgtaggcgttggcaaaacctgttttttgtttcgaacgatatactgacgtttgaaaagtgtctcgataatattcgcccttgttgacggacgaccaataccgttttctttcatgagttcgcgaagatcttcatcatcgacctgttttccggcagtttccatagcacgcagcaaagtcgcttcggtaaactggttgggtggtttggtttctttttgcagaaaagaaggctcatgcggccctttttctcccaccacaaaactgggtaacaaatccgcttctctttctttagcgttcgggtcttcaaatacgatgcgaaaccctttttttaagatctcttttccggtggttctgaaagttacatcggctgctttaccaattactgtggtattggctacgagacaatcatcgtaaaatacagcaataaaacgtttcgtaataatgtcgtagacctgctgctggttgaattgcaaatgagcttctattccggttgggataatcgcatggtgatctgtaacttttttatcgttgaaaacctttggtgatttttttatttttttctctaaaagcggttgggtcaattcggcatattttgttaatttttgcagaatcccgggtacttttggataaatgtcattcggtaagaaggtggtatctactctgggataggtgactactttttgttcgtataaagtttgtacgattttaagcgtttcatctgccgaaaatccaaatttggtattgcagtatacttgcagacctgttaaatcaaatagctttggagcgtattcgtttccgttctttttttcaaccgaaacaatttcgaattcactttctttgactttattggccagaagctctccatcttcttttttaaggaaacgtccttcttcataactaaaaagagtttctcggtataaagtctgcagttcccaatacggctgaggtttaaaattttcgatttctttaaatcggtccactaccatggccaatgtaggtgtctgtacacgtccgatagacagcacttgtttgtaaccgccatgttttacggtatacaaacgggtagcattcattccgagcagccaatcgccaatagctcttgagaatccggcatagaataaattgtcgtagttttcagagggtttcagattttcaaaaccttctttgatggcttcggtggttagagacgaaatccataaacgctgtacttcgcccttataatgtgcctcattcatcacccaacgctgaatgagttctccttcctgcccggcatccccgcagttgatgactacttcggctttgtcgaacagactttttacaattttaaattgcttttggatgcttgaactttgcaccactttggtttcaaacttctcaggaagcatgggtaagttgttcaaatcccaacttttccaatggggtttgtaatcgttgggctcttttaaggtacacaaatgcccaaaagtgtaagttacagcataaccattgccttcaaaatacccgtcgtgtttggtattggctcccaaaacggatgcgatttcacgtgcgacacttggtttctcagcaatacagaccttcatttttctctttctaattcaaaagcgaaattaggaattttaaaagtggtattgaaataatagagttacaaagttacaaagggacaaagatgcaaagggacaaaggtttttgtttcccgtaaatttaaaagagaattgaattggtgtggacagaaggatttaaaaaaatctgcataatctgcacaatctgcgagagaaaaaaatagatgttttttaatctcgtggctcaggaataaaacataaaaccacaaacagtagcttgtggttttttgtaggtataaatttcagcttgctttagaagtaaagcggcttgctattgggttattttaattttagacgcaaattggattctctcaaaaattcattaacatgttcttgcttgatttgtgttctgtttaaccccttcagattgcctacatatcctgtaaaaacatggcttatattgaggggagaaataacacctttatgagatgtattatggcaaaagaagcaattaacaagatcgttaactgaagttttacttattgttgttggactaaatcctgcctgaacataggtttccatcgtaatattgtaggctgcaacagaacctctggttagttttccggggttagagtctgaaagagtatcacctaacgaatttaataaggccgcttgagcctgagtagtattgtatccttcagtattaatccataatgaaccattgtaaaaataattattccagatacctttcagctgtgttttaacgctttgattgatagtacgaatattattgaagttttgtgaaccattttgactcgttttcatataaacctgaacattatgcggacctttcattactttttcgacaggaacaccatatttgtaaacagaaaagatatcggtataaattccgttcttactagttatatttttaacggttgcggtgtcttttttattaaaaaaaggataatcaactgtacttgtcactggtgcatcagttgttggcgtagctttagaccaatcgtaagcaggggcaagattttcatgttcaaaagtagcccatacaaattcgggatgattttctactactccaacgacatgcatccccaaaagtgctattctttttttcactccattgatgacaccctgagtaataaaataggaagaaggatctttaagagcactcgcatcaatccaggaggttttaagttctaaggagcctacaggaaaagttatatcttttattttggcaggatctttttttgctattggaccatattttagcatggttgaatacataaggttatccatgaaaatagaataataaaccgtagtagatttaggaacgcctgatgtatatttaggggtttttaaaatgtcctgtggagaacttgcctgagcggtatctcttagaacaacaattccttcacttgtatctactcttttaccttccgcagtcacctgaattaatttacgcataaataatggcagtccattgacgtcattggtgagccaaagaaacttttgccacgaccattggtgaaaatcacaattgtttacggttgcattgttggcaaatacgctcgttggtccttcattgggcggaggagtctggcgcgtgttgtttaccatcgtaaaccaattagcaggagctaaacaggtagcatcagtggcagttttgtttagtgttgtgtaagtgtctttttctgtctttggatcctttttacaggcacagaaggcgattagcgtgattaaaagcaataccttttttgtagttttcataagttggggtctttagttcgtttttgtagttatctctttttgaatagttgaaagtaggtaattaagaaacgggcttcttaaaaaatgtcttaaacgctccatttttaggtatgaagaccagaaaagagtgtatgaacaaaatagaagattattcttttgttctaaattaaaaaataataagataattacttcaaaatgtgtgatataaaagattaaaataattatattcgttctgccaaaactaatcttaaaccgttagaaatgaatataaaacaagctacgactatagacgaagtcattcagctactggatgaaataattgcagtatcaaaaatagaacaaagtaacataggtttatttgcaacgttataccgtgaagttacggtgaaagtaaaagaaggcattcaaaatggagcctttcaaaatggagagcgaatggagaaactggatgtcatttttgccaatcggtatttaaaggcctattacgaatataaagccaaagaaaaaccatcagaatgttggggttttgccttcgaacaagccgaaaagttttggccgatagtgctgcaacacctattactcggaatgaatgcccatatcaacctggacttagggatagccgccgcagagatcagtacagtagaagatataggaagtttaaaagctgatttcgacaaaataaataccattctaagcagtcttgtaggaagcgtagaaaaatgtttgattaaaatttggccaacgcttacctggatattaaaagtaacaggcaaagcagacaccttttttattgacttcagcatggaaaccgccagagacggtgcctggaaatttgccaatgaatttgtagcggttcccgaggataaaagaaaagcctgtacacatgaaagagacgagagaataacagaaatcgcccgcttggtttcaaacccgggttattttgtgagcgccgttttcaaattcattcgtttattcgaaaggggtacagtcgctcaaaaaataatcgatatgcagattgttgaacaaaaaaacttggaatgtgctgttgcttaatttttagaaagaagcgcaaagagtattaattcaatttttctattttgaaatcgagagtcattccttcaaacaaagcttttcctttagaggtattaccatttatctcaaatatttcgacagctatagtttttcctaaaaaatcaggtctctgacatttcgtaaaggtaaattcataattgcagtttgatttccaggtaattttaccttgaatttcgtctttcgattctttaatagtctcaatttgggttgtttcggttcgagttataaatgtatccggaagtccttcgcttgtataaagaaattttccagttttaaatttttcacaattcgattcttgtgaaaggcatttaatagatagaaagccaagtaaaagaaaaatatatacttttttcataaaatctagattatttgtaaacaaatatattgcagattggattttaatccaatctgcaatattggccgagcctatggctctttaccttgatgatgtatttttttcttttaaccgaatgttttcggtttttacagaatctttttgttttattgtgtcctccggcttagttacttcagattcatttattgtgtcattattgattatcgcgggttcaccatctatcatggcttttcccatacaactggttaaggagaaaactaaactcaaagaaaataaggccatttttttaatgggtttgattctaattcggttaagtcgattttttaagtgatcgtattttgtattttttgtagttgctacctgagtagatttaaaatgcccgcagatactttctttacctgaattttcaacaaaatagttctgaatttcggtagtattcatttttgtaaaatcaactacagttttactacacgaaccacaaaatctaccatttttattgggtgacattgagttccagttttcattacagggtttcggtacagttattttattttccatggttattttaaattgataattcaattggttagacaaaaattattccagaatgagaatatttttctacctatttatttttttttcttgcgatgtgcacatctcgctcttgctgtcgtatcaatcttaatttcgtaggaatgaaatattttgtagcaacggattgaaatccgttgaaaaaaggatttttgttttacaaagttccataggaacgacatctatttgccgtctttagaggtttcgaaccgttggtcttttttgtaaacgtatatatttaaattaagacattcgaaggctaaaagttaataattgttttgcgaagtctcttgacttttgcgtgttaagacttcgaagagcggactttcgtttaaagaactgtaaatcgtttcttccgaccagttcaatttatagaattttatgtagctcatccagcaattccatttcgtcactgggtaaaagctgtaatgcgatttcgagtaagtttatgatatcgatgtcagtctctgatggatcacttttaagggtttgaatacaggttcgcagtaaagacgaaatagttgaatttaattcattgtaactggctattttgaaacgagacacaaccaaatcattctgctgttcgggtttcagacttgtaaaaaagttcattttagagactagatttaaaaattgggttgcttgtactgtacggtcttctttcatggtgtatagtttttaaattgatgtaaaaatcttacttttgaaaaatatttggcaagtaagccagagatggcatgatataaaaaaattcaggtttgtaagcgacaaatgaactttgttttttacaaaaacctatttttctttgcaaattttaaatatctttgatttatgagcacagcaacaaaaccaaaacatatcggcagaaacattagccgaatcagagagcttagaggaatgaaacaagaagctttggctatggcaattggcgtaacccagcaaacagtttctaatcttgaagccagtgaaacggtagaggaaagtaaactggtagaaattgcaaaagcgcttgaagtaagtgtagaagcgattaaaaatttttcggaagaagcggtttttaattatttcaatacttttaatgaagcagtttcaggtagtaattttggtcctcaaagtacttgtactttcaatcctctagataaagtcgttgaactttacgaacgtttagtactcgctgaaaaagaattggtgaaggctgaaaaagaaaaagtcgaatatttagagaaagtactgaaaggaaagtaatagtctcgaaagagagtttttataagattgttcagaagtcatggtgaaagatttacaaaaatatgctgaaacttttttgaccacagagctaaaagaaattttaagttctaatcgacacaaaaatacaagtgagttaaatgaatttgaaaaggcaattatttataattattctgatattggttatgaatctttgaatgaaactttaagagatggaaaagatttacctgaatttggaaaatatttaaattatgctcttaagaagttgccggattataaattgctttgctacagatctataaaagttagtaagtcgaaattacagaaatattacgatgctcttaaaaataattcgattataattgaagagagctttttatcttgcagtaagtcaagatttgtagcttcaggttttagcagtagtccattattcataatttcttctaaaagaggaaaagacatagaaaaaattgctaaatttggtatagacaatggagaaaatgaaagggaagtgctgtttatgtcaggttcaaaatttaaagttatggacattacagaagaagcagataaaacgattagaataacacttgaagaagtttgatatggatttggtaaaagaatataatgaaaaatcacatttcaaaaatgcaaatgatatttttgaagttttggcggatgttcttatgtctggaactataagatctgagtataaaaatcctcacaccattgaaaataaggaggaaattaattctcttatgattaaatttctggaggatgttttgtctaatgatttggctaatactaagaaaaggaaactgtctgtaataaatttattagacgaattcaattacagaaatgaaatacttcatttaatggcagtaaaaaactcctcaaaaggtaatgagctcgaaaaaacatctgagagaatgggacgaaaatttatgtcgtctgtaaaagaataatattttacccgttatgttcacgagcgtcccgcacgtactaacatagggagtttttataataagaatgcgcaaatgtcttttgggacttttgcgcattcttgtttttataaagtgatttttttgcgttcgcacgagcgtgggagcctacttttattgttgtggcaaatttgatttttatttttgttttgccacaaaagctgtaacaaattttaatttattttcattttgttacagaagttgtaacaaagttgaatttatttttattttgttacagaaagtgtgacaaaataattttttgttttcattttgtcacagcaaaaaaaatcctgtaaatctttttaggatgaagtgtaaataggtaaacttttttcaagagaagactagaaaagaaagtacgcaaagtacgcaaagatttttttctcattttatgtcatttcgaccgaagggagaaatcacattagaaactcgacacagaatgtcgccaatctttgtccaatcccgcgtgcgatttgcttcgcctgttcgctgtcgctcgagtctcccttcggtcgaaatgacaagctttgtggttatagccaattgaacccaattatttcggtaaatgtgccaccaattcaacctctaattttgcggttggcacgtataattgtacgatttgtacccatgtagccgcaggaaagtcaccattgtagaatttttttctaacgttgttgtactttttcatggtctcaatatctgtggtgtatagattttcttttaccacattggcaaacgtggcaccataactcgctagtgaagcttttaaatcgttatagactgttgtgattcctgccggagttaattccgttgttacagcacccgaaatgtaaagtacattgtccacttttaaaacctgagcataaccaataacggtatcttgtttggggccattgttccaatgccatttttccttttttattttggcttcctgtgcaaaactgatattgaaaacgaataaaaaagaaagtaaaagaaaatgtttcatagtggtttgttttttttattgtagttggttttaaggttttatctagatttagacgcatgagcggggggatttctctcatttgcgagagcttctcgtccatgtacaaaataaggatttgaaattgatttttttatccaactaatttttaagcatacaaagtctccggacttcgcacagcgattacaatatttaataacattttttgtagcgggactagtagctatttatattcaggccttttttttataatattatcgctttcatactctactaaaggaaagaattttttaaaatttaagccatacaataattcgccagaaatattttttattaaattatatttagttatcagttcgaaatcgtgagcttgaaattttgttaaagttaaatcaatttcaggattaatttcccaagcgcgacctaatgacgataaactattaaaaaaaattattgcctgttcgtaagttgataattgagcgcgtagagttttaatgtagttatattttgtttgatatgagatgttttgttgattattaataaacttcactgtttgaaaaagatgtctaaaatagtgcccaaatctaaattgatgacctccataatatttaacaaatttgttgtgatagttttctgcaatatttgagaagctaccatctaaacatctagtttctctccatctataaatttcctcaactgcttgtcgtcttttagctcttgtactttgatgtggtatcattgcccattttttgaaaatacttttatcataggcaggtttcaatcgcagatattgtattgtataatcaatcattttatctttatatttatccttaaaaatatgttttaaaataaggactccttctgcactcaatccataaaagatgatgttatagcagatgtctattcttgctaattgataaatatcgattttattttttataatgtatggatgttttagcatttgctcttcatattccttaatgtagatctgaggatttctaaaaatgggttgtaattctgttttgcaaataataatttgattaaaaaagactttaaaaacagattttcctataaatttagactttccaatatgtaatgaatcgtcatcttcaacaagttttctaccgtcgaattctagttctgatacattttcacgatgcaatttaattaaatcaaagaagttactttctaaacgttctctttggaaagatgttttctgttctgagaatgttaaatacaagtaatagaatcctaccgcggaaattaaagttccaataactccaccaataaaatcaccaatttgtccggttatatcatatttaataggcataggactccaaaaggtatagccatcacaccaaattcgcgctaaaaaaaatgctatagtaagaaaagatattataacggagccccatgctacggttttgtgattcatctatttatttttgtaattaaagaaaatataattttttattatatgatgtattaccaccattataataaggagaaccaggatagctactttctcctgcacctgttatagaaccactaccatatacgccacctccctttacattagctcctccaaaacctccataatttgttccagaaaaacttgttgtaaatcctgaaacatatccactaagagccggagcatttcctccaccgccgtaaatattacttcctgagccagttgtgctgccacagccaccaataatttcacgcatttcatctttttccaacatcccaacaatatcagaaaatttaatttttttaagatttttcataacactgcatttttttttttatctccaaatatataaaagtacttttaatttgtagtttttttcttgttattttttttgatataaaattatttaatatgcaacttttattgatttactatgaattcctaactttatccgcccgaatattaatttctcaaactcagcaggaattttacagacttcatctttatcgaaatactcttttaattcatcaagtaattcctgaatcgttctagctgtcttcaaaatttcaagaataactaaatctaactcgtcaatataaactaatgaatatctattctgatcacattcgggaactatcagtgtagtaaacttttttttgcttttttcaagttttactatttcatcttcttttatatctttctgcttctcaataaaagaactccagttaaaatcgcttttaatcgttagataatcgtccccccttattattcttttactataaatttgttttttgttctcaaacagatactgaaaataaaaatctgctttacaatctcttgcatataagtaatcatgagaaataaataaaaaatttatcttggtgattgcatttattttggagtgaaaaacttcaagatctacaaactgctctttgctcaatacaacatttccaatttcttttcttagatctcttttgaaatcatagtaaattgactttacgttttctttttttttaatttttactttttcactatttaaacgtttgtatctctgaagtaaatagctctcagtcgtatcctgaagattataataatctttaaagagtggtgtcttatttcttttaaacaaatcaattattctgtaataatactcgggataatcctgtcgcagtctattactcatttgtttacaaacaaattcatttcttttgtaagctcccaatacatgcaaatactgtttttcataaggtactctggcaaaatcaccaaatcccttgtattgattatccccgatcgtttcagaaaacagaacatttacctttttcttgtatttctgggtcatgcaataaaaaaggtattgttcaaagaaaatattaaagcttgaaacattaattttagaaagattcaaaatgttcttatttacaaattcaaaagcttttgatgcatattctttaaagaatgaaacatcattacctccaaatatccccgcattataagccaaaataggtttcttcaatttcctttcaacttgtatctctgatgggaaaaaattcaaagccaattctaaagaaatcattattttttcgtaataatctgttgctgcttctttgttttgagcgattaaacctccactcaataaacgatcctcaaaatcattccaaataaacacatcaccgtcaacatgcaaaaaagacttttcctgctgcgaataactatgaattttaggcaacgcccaaagctgagggtggtatttatttagaacatccaaattacaaactacgttagtataaggcaattctaaagtatcaatcaacatttttgcataaacactatcacagtacagcactacttcaggataatattgctttaactgtaaacaacttagagtccatgacattaagttgtactcaggagacaaccagcctgagttagttttcagcagctctggtttattacaagcccaggcgctttgaataattctcattgtttaaaaaaaagaataataaaaacacaaaagaagttgattatacctgaaaagacaaaagagataagttttgacataaaaaaaatattataattctaaaacattgacttgtacacattaaaaaattcagtcttgaattttgtggtatcaatttgtttttagaaactataatattttgcatttcaaacttaggtaaaaaaatcgaacaaacaaagatttttcttacaaatttaaaggtttaggatattgctttttaatattgcggatcaattcctcaagcccgttcaattttagctcatagataagtgctaattgctgtcctagttctccttttgggaatcctttgttttgataccaaacgacataatattcgggtaaatcaattaaaaagtaaccttcgtattttccgaaaggcattttggtatgggctaatttgatgagaagttttttgtctgattccatttttttttaaagaaaaaagaagcaagagaaaagaatatagactcattctcttttcttgcttcttgttgcgcaaagctattattattttttttcttttgccagagattaaaaaatagttttcagtcgcaattttcagtcgcaagaccttaacctctttttaaaacgtactgccaaactaacgattaataaaaaacaactattcgggcaaatgatttcgccacgaattnnnnnnnnnnnnnnnnnnnnnnnnnnnnnnnnnnnnnnnnnnnnnnnnnnnnnnnnnnnnnnnnnnnnnnnnnnnnnnnnnnnnnnnnnnnnnnnnnccttagtgacttagcacctcagaaccttagccccttttaatattttcttttgccagagattaaaaaatagttttcagtctcagtttttcagtctcggtttcaaacttactgccactgacactgtaaactgcgactgataactaaaaccttagaactttttaagattttcttttgccacagattaaaaaatagttttcagtctcagttttcagtcgcaagaccttaacctctttttaaaacgtactgccaaactaacgattaataaaaaacaactattcgggcaaatgatttcgccacgaattcacgaattatacttagaatagttcgtgaattcgtggcgaatattaaaacttaaaaccttagtgacttagcacctcagaaccttagccccttttaatattttcttttgccagagattaaaaaatagttttcagtctcagttttcagtcgcagttttcagtcacagtaagtttgaaactgagactgataactaaaacctttgctcctcagaacctttgctcctttgaaccttagtaatgccatctcacgaaagcttccattgcagcataggtcgctaaacctaactgttggtataaagctgctgtttcggcatttcggtcttcggctctttgccaaaattctctggcatcggttccctggaaaacaacgccgtctttttgagactggtgtttgaagataccgtgacgttttgctaaaacctgatcagggctcattggtaccgccatttccacttcgtcaattccccattcctgccatgctcctctgtataaccataaccagcaatcgtccatgaatgattttggtttcaatgcttttacagcttcaaaaatagcatccagacacactttatgtgttccgtgtggatctgctaaatctcctgcggcataaatttgatgcggtttgattttttcaattaaatccatcgtcaattgaatatcttcttttccgattggttttttctcgatggttccggtttcatagaatggtaattccataaaatgaatttgatcatcgcttaaacctacaaaatgactggttgctctcgcctctccttttctgatcaatcctttgatgtaacgaacttcaggaatatcaatttcactgttctttttattgattaagaaagtcgctgctttttggtaaatattgtctgcttcttcgcttttgattccgaatttttcattgtaatcaattacgaatcttgcaaaacgcaaagcttcatcatcggctacagcaatattcccggaggtttgatacgccacatgtacttcatggccctgctcttgcaaacgcatgaaagttccccccatactgatgatatcgtcatcgggatgcggactaaaaatcaatactctctttttagccggttctgctctttccggacggttggtgtcttccgcattcggcttaccacctggccatcctgtgattgtattttgaagtttgttgaatattttaatgttaatatcgtatgcaggacctgaatcagctaacaaatcgctcattccgttttcgatataatcagcatcggtaagcattaagattggttttttaagctgaagtgctaatcctaaaacggctttacgagtcagtttatccgtccatactactttttctactaaccaaggcttgttgattctggtaagttttgaagaagcttctttgtctaaaacaaataccgcattgttatgctcctgtaaaaaggaagccggtacacgattggttacttcatcctctaccgatttctttacaatatttgattttccttctccccaagccaataaaattacctgcttggcttccataatcttttttactccaagtgttatagctgttcttggcgtattactcaatccgaagaagtctttacttgccgcaactctggtaatatgatctaaagccactaaacgtgttttagagttttgtaacgatcccgattcgttgaaaccaatatgtccgttacctccaattccaagaatctgcaaatcgattccgccaagagcttcaatctttgcctcataatcgtggcaataatcagcgatttgttctttggtcaaaagtccgtccggaacgtggtagttttcaggtaaaatatcgacatgatcaaacagcaattctttcataaaacgaacgtaactgttgattgaatttggttccattggataatattcatccaggttaaaactaattacatttttaaagctcaagccttcttctttgtgtaaacgaaccagttcagcatatagtccttttggagaagaacctgttgctaatcctaaaatacaaggtttgttttctttttgtttggattgaattaaagccgcaatttcctgagctacttcttttgatgcatcgccggaattttcaaaaacgaccgtattgatgttttcgaaacgtttttcgaaccctgttgctttgtcgattttactttttaacatgatatagttttttaattttactcgttacatcttaccacttacgatatttatgtccttttactgcgtaaaaaaggatcattaaatacgatggcagcagcattaaataagcaatctgattcccgctttttgaaactcccacggtaccatttgccgtatttgctgcatttatattttctgtgatcattccgtagaacaaaggaaaaattgctcctccgatgatccccatgatcaaaattgcacttccaatttttgtataacctcccaaatcttctaatgccatcggccagattgccggccagcaaagtgcgtttgccaaacctaataacgctactaaaagtatcaccaccggtaagtttggaatccccggtaactgaatcattatttttggcgaaatcaatactatggccaacactaaaatgactcccaaaactccggatcctttcaaagctgttacttgtgaaaggtattttggaattaatgtgatccctaatatataccctacaaccattgccgacatggtaaacgaagttagttttaaataaaaattcccttcggctccatatacgcctagttgtttcccgaatcctccaatcgaatctcccgccaggacttcggctgctaaatacagcatcaaagtaattactcctaaaaccaattgcgggcgtctgaaagcatttctaatttgcttaaaaatactcagatgcgctacatttccttcttcatccaaatcaatttccggaagtggagacagttttaccaaaagcgctaaaaccattataatcaatcccatataaagatagggtctttgcaattgtaatgcaagtgaatttaaagcatttgtttttgaaacggcgtccaaaacggcaatcttatctgctgtaaattcctgcatattagacagtaccaatgctgttaatagcaatggcgctacaaaacctgccagtttattagcgattcccaatacactaattctggctgctgcactttctctcagtccaattactactacataaggattggaagccgtctgcaaaattgccagaccggttcccatcacaaacaaagcaattaaaaacagtaaaaaggttcggctttcggcggccggataaaacataaatgctccggctgcaatgattaataatcctaaagaaataccatttttgtaccctaccttttcaatgacccacgacgaaggaactgccattacaaaataggcaatataaaacgcaaaagttacaaaataagcctgagaagaagacaactcgcacgctaattcaaaaaaaggaattaaaggtccgtttaaccaggtgacaaatcccaatataaaaaataacgcggtcagaataatcatcggaatgattgaactcctcttttctatatgtattgcagtctcaatttttgacataattttattggttgattgttaatagattagttgtttgattcctctaaaataacatcaacactttttgcaaatatatcgcaatttacccgcaattcagtgcgtattttttgcaattttaaaacaaaagtagtctaataagttatacttatctgtaaattagatatcaattttttgttaatttttcctaaatactccagtctaaaaccggataatattgcttcaaatactccttcacatcagcaatatcttctttagccgtaaggtccggaacatgctctgaaaacggaatacctattgttgtatttgggttttcttttacagcatttaacagcactgtaggcagctctttttcgtcgcgctcaggatgaacaggacaatttttcaaatgggtatataaagtgcttccgttgaatttaaaagtattcatactcactctgattttcccttctacatctttatagtcggctaagacatcggctgaaggtttttctaaaatatccaacaactgattgttctgatctaatttagcaatggcgaaacgcgaaattctttcagaaggaaattccaaagcttcacgatcgtaagcaataaacgcatttggactgttggtctctctaagtgccaataacgcagctgccgaatacaagttgtcgctgttgcaaaccgaatactgctgtgtgtttaactccggaaactgttctaccgcctgaaacaaagcatcggcagtaccaaagggcttcactctgccttcgggaatgtattgtacagcaaatgaaatagtaagtccatgaaaatcgttatcggtattctgactgccgtaaaactctttaaaaagctctccctgctcaccaataatgatgtagatgtttttatatcctgcttttttagcgttcagcagaagataatccagtaaaggtctcccgcttgctccaactccaattagccctttacttctttcatttgcctgcgcaatttcttcctcagataaattgtttgaaatagcttcttttttcatgcgcgaggatgctccacccgcaagaataactaaattgttatgcatatttatgtattttcatttttaattttcttaaatctatttaggcatggaattgtttcaggttttagttctcggtctcagttttcagttttcggtctcagttttcactgtgtactgcgactgaaaactgcgtattgtttcaggttctcacctctcacctctcacctctcacaacttaaatctcacaacttaaatctcacaacttaaacctcacaacttaaacctcaacattttcaataacccttacacccggatcaaccgctacggcataggcttcctgagctcctgcttcgagaatggcttcgatcaccaaatcttctttttccggatttgcgataacgactatacttcctcctccgcctgaacctacaatttttgctccgtaagcaccagcgcgcaaagcagcattgaccatagcatcaattcgcggtacagtaatttttaataaatcgcgtaaaacttcatgatgctggttcatcaatccgcctatttttttaagatctaaaaccggtttttcaaactctttcagagcttctttggtataatgatagttttttaatgcggcttcgaagaaaggaatcaatcggtccggcaagcaatttcggtaacgatccaggtcttctattttggaagcatgcagatcaaaatccgggaaattttgctttacgatatcaatagaaattaaagcatttccttttaactcccccaacaaaccgatcgtttcttttggaactcccgaaactcctgttatcaggcctttcaagctcgttcctattactttatacgaaaagggatctttggtattgatgtacacaatattccccaccccaatactaaaatgatccatcattccacccggttctccatgttccaatacttcagattcataacccaatttggaaataaactcaggagtaacttcacgatcaataccataagcatcgatcaaaaaacgaatccatgccatcaacaaagccgaagaactcgaagttccggagtttattggaatatctcccgtaatagtaatgtcgtatccaacgtttggcacacagccgtacctgcgcaatacacgtaaggaggaggcaaaataatctctgggttctaatttgtcgaaagtggcgtcaatatcaatggtacgaatctcattaatatcaatcatatttaaaacaaaggtctgagtcagattttgttcggcaattagttgtatattccgatcgattgcacaggcgataaccggcaatcctaaataatcctgatgatctccaaagagacaggttctgcccggggctaatgaggtaatttttttcacttgaaaattttataataaaacactgtaaaacaaaacattacaatgaaacttggttaaaaattggtcttattcttttgattttgattctacgaaactattgattatatttttataaaacaagaaaaaacaaaaaaatgtgctcgaacacactattaaaatgttctcgagcacactaattaattcttacaggatttttaaataatcaaatcaaagtttctatatttgccaatatggataaaaagtacaccattaaggatatagcaaaaatggccggagtttcgaaagggactgtcgacagggttttgcataacagaggaaaagtttctcctacagcactggacaaaataaatgaagttttaaacgtcattaattacgaaccgaacttaattgcacgaaatttaaagaacaccaaagtttacagaatttgtgttttactgcctgatccggaaattgacccgtactggcttccctgcattaatggaatccaggatgctaaaaccgaatttaaagcgtatagtgttattattgaaacacacttctttaatccggaaagcaccaaatcgttcttaagtgctcatgatatcattatccaaaaatcgcctgatgctgttttaattgctccattattccacaaagaaacggtagaaattgtaaagcaatatgacgatttaaacatcatcgtaaacaccttcaacaaccaaattgaaggtgaatctataaaaagttttgttggacaggatttgcataaaagtggtcgtgtagctgccagcctaatgaatctgattttaacagaaggtcagatcgccatcatacatattgacgaaagccttaaaaatgcggtacacatgcaggaaaaagaaaaaggctttaaaagttactttgatgagaaaaagatcagtggtttttcacttaccactctaaaattaaaacatcagaatgtggaaactaaattttctgcatttttagacgaaaatccaaatctgaaaggtatttttatcacgacctcaaaagcgtaccaaattgcctctatactgtctactgtaaaggataaaaagattgcggttatcggttatgatttagtggaaaaaaatgtgaatttcctgaatcagggattggttcattttttaattcatcaaaatcaaaaacgacaggcttatttaggcgtgagtactttggttgaacactttttattccgaaaagatattccggaaacgattttacttccaatagatattattaatgtggagaatgcttctttttacgtttcctaaataacactggattgtcggtaaattccacagagttacacataaggttacacagagatacacaaaaaatgttttaaaaatctttgctgactaagcatttcacagagttcttaaaaagcatcgagctatttcaagaactcacaaaacaagcaaaaaatctgtgttaatccgcgtcttcgcaaagcgaaccagtgtcatctgtgtactgttaggcttaccgtattgaatctttgttttttcacgcagatttaactgatttaagcagatttacgcggatatcccttaaatcaaactaatgattacaaacaagtgacaagtttttttttatatcgattctttacaattttctttccaacagatctggcagattttatagatctttcttagtcaaaaacaatataaatttgttaaaaacgaaacttcgtactataaaaattccacaggaacgaaacatataaataaaaacaacaagcatcacgtataaaaaactttgcaacttagtgcttttgcgtgattatttttaaaattcaactcatccttaaaaatttaaattaaccgtcacaagactccttgcttcagcaaactcacacagagatacacaaaaaaagactttaaaataacttcgtgaagctttgtgattcctttgtgtaactctgtggaaaaaccatttcatcctgtaaacccctattccattaaaataaatttcccaaaagaagaagcaatatgaaaattaggagtttcggtattaggatttacccaggaaatccaggtaggttcatactcccgattttcattctccaaaaacttagctctaaaaacacccgcttctatagtattgttgtgtattaaattcaactcttttaaggattttatactgattcgtccttcaactgtaaaagaaatttcatcttttgaagttttgatttcgaaatcggttttaggccatttccagtcaaaatcaaattctttgttgggacgagctctaaaatccattaaacgcccggctgtatccatttccagacaataataaggatctaaggattcgttcgttctaaaaaacaattctacacgatctgaatttccaatactgtcaaaactatcgtctttttgatcaatataaatttgggtatcaaaaactctgaaattaaaaaagaaattttcaagatcccagaacgctctgaattctatttttgaaaatgggtcacttttccatggcgagcaaaaatcagtgaagcaatttgcgttttcccaaaatgatacaataggattttgcacttctttttcctgacttttatcttgtaaaactacctgatattctttcactctattttatttttattttgttaatttttttaacattttaaaactttgaaaatgacttcaactatggtctgatttttatttttttcgaattatgaatgtaggttaaaatttaataaaataaaatatctcattttttatcataaacgaagagtgaagagtgaagagtgaagagtgaagagtgaagagtaaagagtgaagagtaaagagtgaagagtaaagagtaaagagtaaagagtgaagagtaaagagtaaagagtaaagaataaatagccacgaattcacgaattttttctaatctgtatggtttaaaaaaattcgtgaattcgtggcaaacttttttaaagtttcagcttttttttgagtgttaagtatttggtttttagttgtttggtattttgttttaacataacaagaattttttgttattacttctgttatatcacaaagtagctaaaagtgtttcttaaaccatagctttattgacataactggctttttcaaaatccataatattgatcgaaataatagggacttcaggaagtatctcgtttagtttagtgacaattgcttttgataatcctgctttttgatcggtatttctgccttccagaatgtaggcaaagacgtgaataaaatcgtctgaagaatttccattattataatagctgaaaggatggatacgaaccttaatatcagtaggaacgaaaagagtagtggctaaagcggtatggtaaatttcctgcatgatatcgtcggcagattttaatcggattactttttcagagcaatcaataacaaagtgtggcatgagtataatgtttaaattagcaaaaatgaagtataaacaaatttacaaaaatccgatagagaatgagtgcagttatttgttttcgggagcttttattttttacaaaaaccacaattttcaatctgctaaataattactttttctagtagcactttcttatatttgcaagtctcattatattcccaattggtttgaaaaattatctgctgtttcttctttttatcattttaggaagtcctgtttattcagcggacagcacagatagtattatcgataagttaaatgaagctttaaagaacaaagctcattatgttcgtttgagagaagaacgtattttaaatttcaaaaaaatcaaatccgatgatttaacgaaagagcaggagtacaattacaaccaaagtttgtacagtcaatatctgaaattcaattctgattcggctattttatatgtcaaaaaaaaccagaaaatcgctgctgaacttcaaaataccgatttactgaacctggccaatctgcaattggtaacattgtactcttcctcgggaaagtatcgcgaatctgaggccattttaaaaagcattcctaaaaaggaattgcctaagaaactactacctaactattatattgcgtatcgcgagtttttggaacattatgctgccaatagcgacgatgtaaagtacattgagcaaattaacaaataccgtgattcgctgctcaccgttttagatccttctaccttaaactatcgaatcaccagaattgagcaggagatgtcgcagaaaaagtttgctgcagctgaaaaaaagctatcggatttattgaaaaaagcaaaagacgatcatccgcagtatgccatgattacttatcttttggcgagcatctataaagaaacgaagcagccggaacttcaaaaaaaatactatgcactttcagctactgccgatctaaaaaccgcaaacaaggacaatgcttctcttcaggaactcgctttatttttttatcaagccaatgatgttgatatggcctataaactaacccaatcggcgattgaagatgccttgtattgcaatgttcagtttcgtacccttttaatgtcagaggtatattcgatcattaacactgtttacttagagaaagaagctaagagaaaaacggaacttcaactgtaccttttatgtatcagtttattatcggcatttttagttgttgcggtgatttatgtttacaaacaaatgaaaaaagtatcgcgaatcaggacagaactgtataatacaagtcaaaaattagccgaattaaataaagacattacagaaaccaacaatcagctgcaggaaagaaatgcacaattatcggaatccaaccatgttaaagaagaatacattgcacatttttttagtctttgttcagcctatatcaacaaactagaaaattatcgcgtcactttaaacaaaaaagcgaccgccaaacaatttgatgaaatctacaaagtattgaaatcaaccactctcttagataacgaactggaagaattatacaaaaattttgacatcatctttttgaatttatatcccactttcgtaaaagatttcaatgcgcttttaattccggaagagcaaattgttttaaaacaaggagaactgatgaatacagaacttcgaattttcgctttaattcgtttaggaattacagacagtgtaaaaattgcggcgtttttgcgttattctttgagcaccatttacaattaccgaaccagagcacgaaataaagccgcagtttcccgaaatgattttgaagaaagggtcacaaaaattggcttaatatccgtaaaactttagaaaatcattctaaaatcactactttttttggctttttgttttttgtaagcaattgttattcattaagttgtgtttttaattcactactttttttcatttagaaatccagaacaaactataacgttttagctttacagtattcttaaaaagagaggtactgcttatactttcttcctattgtaaattaaatgctttaataaattaatagttatgtttaaaaatgttaaaacaattgttgttttactattgttgagtgctgtcggggcgagtgcacagcataaaattccggtttatttagacgataaaaaatcgattaatgaacgtgtagaagatgcccttgcaagaatgacaaccgacgagaaaattgccatgatacatgcgcagtcaaaattcagctcaccgggtgtgccacgtttgggtattccggaaaactggatgaccgacggaccacacggaattcgtaccgaagttttatgggacgaatgggatcaggctggatggactaatgattcctgtattgcttttccggctttaaccgcactttctgctacctggaacaaagaattatcgtctctatacggtaaatctataggagaagaagcgcgttaccgtaacaaaaatgtattattaggacccggtgttaacatttacagatcacctctaaacggtcggaattttgaatacatgggagaagatcctttcctgacttcaaaaatggttgttccttatatcaaaggggtacaggcaaacggagtggctgcctgcgttaaacatttcgctttaaacaatcaggaaatagggcgtaatacagttaatgtaatcgttgatgaccgtgctttatatgaaatttatttaccggcttttaaagctgccgttcaggaaggagatgcctgggcaattatgggggcgtataataaatacaaagggcagcactgttgtcataatgagtttttactgaatgatattctacgtggagaatggggcttcaaaggagttgtagtgtcagactggggaggcgttcatgataccaaacaggccatctacaatggattggatatggagttcggttcctggactaacgggctttcatggggaaccagtaacgcttatgataattactttttggctaaaccctattctataatgattgcaaaaggtgaggttggaacaaaagaactggacgagaaagtacgtcgtattttacgtctgtcattcttaacgacgatgaataagaacagacctttcggttcttttggaacagaagaacacgccaaagcaggtttgaaaatcgccgaagaaggaattgtgctgcttcaaaacaacaataacattttgccaattaacctttctaaaacaaagaaaatagcagtgattggagaaaatgcgatcaaaatgatgactgttggaggaggaagttcttcattgaaagcgagatacgaaattactccacttgaaggattaaggaaaagaattggaaagcaggctgaaattacttacgctcgcggatacgtgggagatccgacaagtaactataacggagtggtagccaaagtaagtctggaagacaaacgttctcctgccgagttaaccgctgaggctgtaaaagtagctgcagccgcagatgttgttttgttcataggaggtacaaataaaagtgacaaacaagacgctgaaggttttgaccgtctggatttgggtctttcgtatggtcaggatcaattgatagcagaattggtgaaagtaaataaaaatatcgtttttgtgaatatttcaggaaatgcagtggcaatgccatggataaaagacgttccgggaattgtacaaggttggtttttgggcacagaagcaggaaatgctttagctgctgttttggtaggagatgtgaacccttcagggaagctgtcgtttacctttcctgtaaaattatccgataacggagctcatgccttaggcgaatttccgggcggagatgacgtaacatataaagaaagcatttttgtagggtaccgttgggccgacaagcaaaaagcaaagccattgttctcttttgggcatgggttgagttatacgacttttcaatatggaaaagtaacagccgataaaaaacaaatgggagccggagatcagatcactttttcggtaaaagtaaagaatacgggaacacgagaaggttcagaagtagttcagctttacatcagtgatttgaaatcttcattaccgcgtccgattaaggaattaaaaggcttcgagaaggtttcccttcagccgggagaagaaaaaacggtgacttttaccatcgataaaacagcacttagcttttttgatgataaaaaacacgactgggtagctgaaccaggagcttttgaagccatcattggagcatcttctacagctataaaatctaaagtgagtttctcacttcaataatttcatgtttctaaaaatggttggttgtaaagctgcaagtgtaaaaacttgtggctttacttttatgaactctgtttttttttggggggggaattgtcaacacacacatacatagaaacatagattttggcggtaagaagagaaaaaaataggaatatatttctttcatatagaaaaactacgtgcatttaatggaagtgaaacgccttttttattagataaagaatctatgtttctatgtgttaaaaatgaattataccaatacgttaaataaaaagtctattatttaaaatactattatgaaaaaagccatactaggtgtcctcaccttatttttagcacaaagtctttcggcacaaagcctgaacaaaatgcaatggtttaacgaacctgaaaaatgggaaattaaaaacaatgctttgatcatgaatgtgacagcgaatagtgattattggcgcatttcgcattatggttttactgtagacgatgcaccgttttattatgctacttatggcggagagtttgaagccaaagtaaagttaaccggtaattatatcgcccgttttgaccaaatgggactgatgcttcgtattgatgagaaaaattacattaaaaccggagttgaatttgtggatggaaaatttaatataagtaccgttgttacacacgataaaagtgactggagtgtaacaactttagagaaagcaccaccatttgtatggataaaagtggtgagaagactggacgccgttgaagtcttcttttcgtatgatgataaaaactatattttgacccgaaatgcacctttgcaggacaatacaccggtcatggtgggccttatggctgcatcaccggacggaaaaggctttgaagccaaattcgaaaattttaaagtaacacatttaccggatcaacgcagactggaatggcttaaaaagcaccaggaatagtaacgctaaaagccaattttctaagaagttaaattctaaatttcaattagaatttccgaagaaaagatttttcttaccttattgatctctaatgtaattgatgtaacaaataaccagtctttctttaggattacaagcttcaatcggccagcctgttagggaaatatcgctattttagctttcaccaaaaaattatctaaccttttaacaaccaaaaactattttatgaattcaagttcaatggaaattaaacccaaaaaacattatgaaattttagacggcttacgtggggtagccgcaattttagtagttatttttcacgcgttcgaagcttttaacgaaggaagccgatttaagcagatcatgaatcatggttatttggcagtcgacttcttttttcttttatcgggattcgtggttgcgtacgcctatgacgatcgttgggagaaaatgtcgcaatgggagttctacaaacgacgtttaatccgtttacagcccatggttattatgggaatggtcattggagcgtcgctttattatcttcaggcttcgaatgttgcttttccgcaaattgctactatgccaatctggaaactaattttagtgatgctggccggttttgtactgataccgcttccgccatcaatggaaattagaggctggggcgaaacgtttccgcttaatggaccggcatggtcgcttttctttgagtatattgccaatattctgtatgcgttgttctttcgtaaattctcgaataaagttctaggctttttagtattaatttttgcgggaatgcttgttcattataccgtttttggtccaaaaggagatgttattggtggttggtcactaacgatgcaggaattgtatgttggattcacccgtttgttgtatcctttctttgcgggagttttactttcccgtttaggaaaactcattcatgtaaaaggtgctttctggatttgcagcgttttgattttagtcatttttagtatcccgagattgggtgatgaaaacagtttgtggatgaacggtttgtatgaatccattgctattatagtattgtttcctttaattgtagccataggggcaggaggagagatcaaaaatccgttatcgcttaaaatttgcaaagccttaggagacatttcgtatccaatttatattatccattatccgttaatttattgctatatggcgtgggtattcgaaaacaaagtaccattaaaggatggttacgggattggaattggtattgtaatttcgagtattgtaatcgcttacctgtgtctgaagttttatgacgagccagtgcgcaactggcttcagaataaatttcaaaaaagaaaagtttcttaaaagaggaactaaggctctaaggttctgagggacagaggtaaagcttttgctgttttgagccattgcagctttaaatctaaaaaagggatgaaaatattgttattttcatcccttttggtttttataataattcatagaaatttctctttccgattttgatttttgtttctttttgcaatgaaattatttcaaatgggttttgaattttttcatgattaatctgaactgcaccgctttcaatcaatcttctgtttgctgactttgtaatgtcatttttaattaaagaacaaagatcaattaaggttatttgatttgactccgtttttaaagaagatatcataaccgtgacaaatgatttcgcttctaaattcttattttgaaattgattaataaagaattcctcagcttgttctgcgctatttttattgtggtactgagtgataatgtttttcgcaatcaactttttaatatgcattggattatcattttctaatcttttcctgatttctaacttttcttctaatgaaaaatcggttgttaattccaagaattctaaaataagttcatcaggaatcgacatggttttcccaaatatttcgtttggttcatcagtcaatccaattgtattgcgcaatgatttactcattttttcttttccatcaagaccttttaacaatggcatacacattacgatttgcccggatattttgaaattttcctgtaattgtcttcccatagtacaattgaataactgatctgtacctccgatttcgatgtcagcattaattttgacagaatcaaaaccttgtaaaattgggtaaaccaattcatgcattgcaattggtgtgttctcggtaaatcttttgttaaagtcattcctgtgcatcagttgtgcgaccgtaacattcgacataatctgaattatttcagagaaagatagttcgtccagccattctgaattaaaaacgatttttgctttttcaacatcaataattttcgccaattgcaaaatgtaagtttcggcgttgtgctttacttcttcagtactcaaaggttttcgactcttgttttttccggtagggtcaccaattcgggcagtaaagcttcctactacaataacaatttgatgccctaagtcctgaaattgttttagtttttttaaaacaacagcatgtcccaaatgcaaatctggggcggttggatcaaaaccaagtttgataattaattttctgttttcttttttagctaaatttagtttttcttttaagccattttcaggaagaaagatggctgtgttttcttttagtttttgaattgtttccattttttttaaataaaaaaagcccggacaaaaatgcccgggcttaaaggttgatatataatttattctttaatttataatcgcgaatacgttgaattatatgcatagcctttccgagcaagtattattgcataataataagtgctgaaaaaaggaaggcgtaatatgctgttcaatgatttcattcgactgcaaatataattttttaattaataacttttaaatttattctaaaaccaactgtcctaaggcttctttgctaaaaccttttaattgatccgtatgtcctgctttgattttggccacccagttaggatcagataaaagaggtcttcccacggcaaccaaatcaaaatcgcctctgtcgaaacgtctgtttagttcctccaaagaagttggttcagaactttctcctgcaaaagcaccaaagaaatcgcttgaaagtccgacagaacctactgtaatagttggcgctcccgtaacttttttagcccagcctgcaaagttcaggtcagattcttcaaattccggctcccagaaacgacgttgagagcagtgtaaaatatctactcctgcatcaacaatagggcttaaccaggcttctaattcctgtggatttttggctagtttatagttgtaatcagaaggcttaaactgagaaaatctcataatcacagcaaaatcgttaccgacctgtcttctgatttcttttacgacttcaatagcaaagcggctgcgttccggtaatgtttttccaccgtaaagatccgtacgcaaattggtttcggctctaaagaactggtcaattagataaccgtgcgcaccgtgaatttcgatcgtatcaaatcctagtcttttagcatcggccgctgcttttccaaaagcgataatagtattttcaacgtctttctctgacatggtatttccattactaaaatcaggtcggtttaaacccgacggtccttcaaaaggcactggtggaacccatcctgaatgatgattgtccataattcccatatgccagatttgcggccccatttgacctccggcggtatgaacctcttcaattacttttttccatccgtttaaggcttcattgccataaaaatgaggaacattagcatcgtttgacgacgaaggtctgtcaataacagttccttctgataatattaaaccaacttcaccttcagctcttttttggtagtaagaagctacttcgtcagttggaactccgtttggagaaaaggagcgcgtcataggcgccattacgattcggtttttaagatttaacgtttttaagttaaatggcgaaaacaggttgtttgtactcatagtaatttacaaattagattgaattaatttactgagtgcttcaaaggcaccttcgttacgtttataataagtccattgtccaacacgtttagattcgataaatccggcgcgttgtaaaatagacaggtattctgagactgtcgattgggtaagacctgctttggcttgtatctgccccacacaaaccccatgctcaaatcccgagtgctggagctgatccgggaagttgatttcgggttcttttaaccattccagcatttgtaatctggatttgttggctaatgctttaaagatttctatagattccataaggcaaatatatcgacttttcccgatatatcaatttaaagaaacttatttagtataattttaagagtaaggatgcaatttgtgtgagaagtatttatatttgtttcctcttgaaaacagcgcttttttgacgataggattgtagaatttgtaaaggacaataccttttgattactaggtttttgaaagaactgtcaagaaaataaccccaaatttattcatgaagattatgaaaaaaacactacttattttaggtttcctatgctgtgctgtcacgagttcgaaagctcaggtggtaggaaccgacgttggcgacattgcccccgaaattgatttgccggatacaaaaggaaataatattgtgctttcttccttaagaggagagcttgttttagtcgacttttgggcatcgtggtgcggtccctgcataaaagagcagcccgaattgataaaactgtataacacttattccggtaagttttctatttacagtgtttcaatggatacgaagaaagctctttggaccggagccattgcaaaacaaaaactgccatggactcaggtaagcgacttaaaatattggaattctccggttattggcgattatatgcttcaatcagtgcctttgaattttctgatcgataaaaatggaatcatactggcaaaaaacattcacggaaacgcattgaacgaaatgttgaaaaacttacttacggctcagtaaaaatagaaactttgagaataggattgttttgagaaagaatgcaggtaagaaggatataaaatggatggaatggaatcaaaattaagtatagctgaatttagagcaagattaaaaaacaatactgaaattggttctttgaaaataaaattcagccacttgagaatatttccgagatttggtgaattaaagcctttttacggtctttttgacgataaaagctttcgtttgaccataaattcggcaacatctcccacttgtttcattataaaaggaagctacaaaaatgttgacaacagacttaaggtaaattatacgattgagcccaatagtaaaattcaattgttttgggtgaaatattcacctgtagtggctataattgcaatcaacctgttttttgttctatttgcgagaggactcaggagagcttctactatcgtgaatttgtttttacttattaccattttctattccagatggaaagaagaaagaaggcgtaagaaattagagaaaaagttcctcaggatttttgaaattaagagagactgatgatagaactaatccaggacaaaagttaggaagaaagggctgaaagcccaaaagaaacagcatcgtgcgcagtactatgaattagactaaggtgtagaattgccctgaaagggcaaaagcaaactatacattataattttcaataaagaccaaaccgctcttttataaaatacaattcaaaaagatataaaaccaactgttaccgataaataacttatactaaaatagttaactagtaatcactcttgcgcttctgtgtaggattttttctaaagtgatgctctgaagtacatgtagttttatactttcttaaaaaaatagttttagcacttttatttcatgtgcttcaaaacaaggatcagtgaaaaaaaaagatgtagtatctaaacgttacatttaacaaacccgacaggtttttgaaacctgtcgggtttaatataaagaaataaaaaaaatgagacggcctttttgcttaggcgtctcattagaagttattagctgttagtagtcaatttatagctttattcaattgggtataatcatcaaaaattaattacacccaacagataaagtttttttttcctggcacgagtaacagagcatccattgatgtccgaacttatccgtaagattcccgaacaaagctccataaaaagtcctttctaacggatgtgtcacctgaccatctttcgataggtcagcataaacctttcgtgtttcttcttcactgtcaaacgtgagcatcatcgagaaggcatttccttttgtcaggttttcgggagccatatccgatcccataatggtaagagtatcgcttttaagagtggcgtgcaaaatacatcttttcattttctccggcagctcttcccctattggagaatcggctatggtttgcagttcgagttcaccaccaagacatgctttgtagaacaacatcgcgtctctgcaattaccgttaaatgttaaataagaattaagctgtgccatttgaatagggttattgttgtgggattttcgccagatccatatacagcacttcccaaaggtgtccgtctaaatcttcaaaactgcgttgctgcataaaaccatagtctttcggctctgcagtttctttacctcctgcttttaaggcattattgatcatttcgttcacttcgtctacactttctactgacaaggaattaattaccgaagctttctcgaaagcattaccgatttctttattgataaactcactgaatttattgtgagtcaacaacatcacataaatttcttcggttagaaccatacaggctgctgtagcatctgtaaattgtggattgtttgtaaatccgattgctgtgtaaaaagacattgctttttgtaaatctgctaccggcagattgatgaaaatttttgttgccattttgtgtgattttttaattgttaattgatagtacaaagatggagtagaaatcacagaatccacctacacaaaaacgacaacaaaaagggcatttacgacaaactatctttatctttgaaattgcattgaaatcaattgttgtatcgctatgatcccgataaagtgttgcattcaacagtcaaccaagtaaaatcaagggctcacaaacagtcagtcaattgtaaatcgtttacctaatttgatctaacctataagaaaccatgataaaaaaagtaagcatacttgttcctgaaagttcggttctgcaggcaattgcagatccgcaatacttattttcggctgtaaatcaatttatgaccgcctccggtaaaaaattattgtttgatgtacaattagtaggtttagaaaaagaagtaaaacttaataacggattgtattccgttaatacgtctcagctcacaaaagatattactgccactgatttaattgtcattcctgccttatttggagacatgaaagctgcaattgcccaaaatcaaggactattaccctggatcagcgaacaatatcataagggcgccgagatcgcatcattatgtgttggagcgtttttgttagcttccactggtctgctaaacggcaaaaaatgttctacccattggggatttcaaaatgagtttagagaaatgtttcctgaagtagaagtcatagacggaagcattattaccgaagaacaccgtctttattccagcggaggtgcacattcgtactggaacttattgcttcacctggtcgaaaaatataccgacagagagacagctatacttgcctccaaatactttgccatcgatatcgaccgagacagccaggcttcttttgctatgtttcagggacaaaagaatcataacgacgaggctattaaacaggttcagaattttattgaagataatatacaggaaaaaatcaccattgatgaattggctgaaatggtattgctgggaagaagaagttttgagagacggtttaaaaccgcaaccaacaattcagttttagaatacatcaatcgggtgaaaattgagtacgccaaaaaaagtttcgagaccagccgtaaaaatatcaatgaggtaatgtatgatgtaggctataccgatacaaaagcatttcgaaccatttttaaaaaagtaacaggattaaatccgttggaatatcgcaataagtataataaaatggcggttagctgattacttctacttgttatcaatcccttagtttaacacctagaagcatcgttttttgatctaaaaaaagatgtttcacttgctttgaggttcccaatagttacttgcgaaaaatagctataaaaagaattttaaaatagcccctaaaaaagcaacggtcgtaaattaaaaaatcactatttttaactaaccttcaacccttttctatgaccgataaatcacaacttcgcagttctattttcagacaccttgacggcctggctgttgctccggttgcaattgcactacaaaaccacaaagttttagagtatattctaaagcaaaagcaagtacaactatcgcagctagctagtgcttttaaagcaaatgaaggctatctgaatgtgggtttgagaattctggcctctcagggctttctagaatatgaagtagataatcgaaaacaggaaataaccatcatcacaaacgaaaaaacagaaattgccttttcgctgtttcctctctttcaggatgttgttgatttactccaattctccggacagtttcatccacgactttttgacgatgttccttttgaaaaactcaatcttatttttgaaaaatacaaaaaaggatatggaatcgaaccttctgatgatcctttgaaaagtagtcttcaggaacaggttttaaaacacgtcgaaggacatttgattggtcccaccattgtacgtctggccatgaaaggaatgtttcacaaatactttatggagacttctttccaacccgaagagtttcataaatctgcggaaaactttaaaaaaatactggacttttttgtacatcttggatggttcttagaaaaaaatggcaattatcagtttaccgaaaccggtttgttctatgccaaaagagccagtgcttacggtgttacagtttcttatttgcccacctttgccaaaatcgaagaattgatttttggtgatccttcagttttaagaatgatagccgatggtgaaaatgaaattcacgtagatcgcgaaatgaatgtatggggaagcggtggtgctcacgatacttattttaaagtggtagatgaaattattgtcaccctgtttaatttaccaatcgaacagcaacctaaaggaatacttgatatggggtgtggtaatggtgcttttttacagcatatttttgaagttatcgataggcagactttacgtggaaaaatgcttgacgactaccctttgtttttggttggtgccgactataatcaggcagctttaaaagtaaccagagctaaccttatcaaagcggacatctgggcgaaggtgatctggggcgatattggaaaccctcaactgctttcggaagatctgaaagaaaactacaatatagatcttaaagacctgcttaacgtaaggacttttttagatcacaaccgaatttggacagatccccaacacatcaacaaagatagaatcagtacgtctaccggtgcatttgcttacagaggaaaaagaatcagtaacaatctggtcgaagataatctgttggaacatttacaaaagtggtctccttatgtgcgtaaatttggcttgctgttgattgaattgcataccatcaatccgaaacttgcagccgctaatatcggaaaaactcccgcaacggcttatgatgctactcacggtttctcggaccagtatattgtggaaattgacgtttttaataaagtcgcagcagaagccggattatttccggaccaatcgatttttaaacgattcccggatgccgacatcgctacagtaagtatcaatttattgaaggggaactaaaaactaaaacttaaaattattactattttaaaccttctgagtataattcattttaatatgtaggaacataggtttaacatccatttcacctcatttaaatacacctaatatgaggtggaaggaatgtattttcttttagattaaaagctatatttctatgtgattaatcatttttttttgattaaacttaacccaacggattattcaaacatttttttgtcgtttagcataattcccacaagccttagaattcttagttgcacttgtacttttagtccggaaattactgctctttatctttattccttcaccaaaaagagtctcttccataacaaaatctctttctaattggagtcctttcagattattgaactctttaatagtttttaaaaattagataaactactacaaaacaggtatttatacgtaatttaaatctgttttgttattgtaactttattcttattaatcaaattcagcactacactgcagtatcgtctacaagccttttgcaatttattttgtccgaacattatattgaaaaagcactactatcattctcacttcacgcctcaattttatacgataatccaatccctctttttgaattatttcaaactgacccatcaatatgcattacaaatccatataacaattattgcattttttattaaccccttaaaccacaaacaatgaacttaaaagaaaaacttaacgaaattggccaaaagccggacatgattttaattattactgatgagcagcgcgctactcaacattttccaccgggatgggaggaagaaaaccttcctacactaacttttctaaaaaagaatggttttagttttgaccgtgcattttgtaacacctgcatgtgctcccctagccgttcgaccttattcacaggtctatatccagcaaaacatggcgtaagtcaaacgttaaccgaaggtggtctgttgtcacctcaggaacctacacttagcaatgcactgcctaatattatgaatacactttgggccgatggctatgatgtgcaattcaggggaaaatggcacatgagtaaaggtgttgctcctaatggaactaaaacaaactatgaggatttaacggccgccgatatttcactctttggggctatgggctggattgctcccgacgccggtgaagatgtgaacccgcttaattttggaggtggctacgccaatcacgacgccagatacaccgccgaagctattcaatatctaaaagaagtgagagcgcagagagctgctggaaatcataaaccttattgtttgattctttcactcgtaaatcctcatgatgtattggcttatcctaatacagcgggtacatcaggatatcatccggatagctggtcaggtagagaaattgggcttccttccactgtaaacgaaaatttactggaaaataaaaaacctatggctcaggaacaaattctgattaatatggctttaactcttggagcgatcaatagtaccgaagataaactgaattatattaatttttatggttatttgttaagtcttgccgacaaacagtttggctacctgattgacgaattgtacagagaagatgaacacggcaaaaaactcgccgattcagccttagttacaatgacatccgatcacggagaaatgggacttgctcatggcggattacgtcagaaaacttttgtcgcttatgaagaagctttaagagttccccttgttatatctaatccgatattatttaaagatcatcctgtcaaacactctatggccttagcaaccttagcagatatttttccaacttttattgatatggccaacgtatccaatccgccaacgggacttgcaggcaccagtttactgccaataatgcaggacaacactcctgttcagcacagtatactgtttacttacgatgatatcaaagcaggttcgaacagtacctggacgatcgtaagagctgcgaatcgcattcgatgtatcagaaccgaaaaatggaaattcgattattactttgatgccgccacggcctacttcaaacagtatgagctgtatgatttagttaatgacccattggaaatcaccaatcttgcctacgatccggcttatagtgaaatcagacacgaattagaagaacaactgcatcaacttgaggttgaaaaactttgggtgaatgcgccaaaagatgtttatagtacgacaacgtttaactaaaaaacagctgcaggacacagttccaaaaaaataaagtactaatcaaaaagaaaaattatgtcagaaaatataaatctggaagtcaatacggcaaagtatacggatttcaattatcctaatggcggagaaaccagcatacaaggcgtaagaggcgtaacaggatctgaaaatgtatacatttcaggcagtttaataggtcttgatgatattgttcaaggcttaatctatgaaggaccgctaaatggaagcggtaatcagggtaaatggaatattgtaaattttccaagcacgccaacagcaacagttatcaatacctcttgctacggtcctaataacggacatcatggcaaagtacaaatagtaggctcctataaaatatctgcctcttccggtaaagctccaagcggaaatcttggtttttattacgaaggtcctgtagatggttcaggaacctggattcaggtgtcgccaaatggcggtaataccaataatgtatttgttcatagtataatgggcggaatcgctgttggaaattatgatgtagagaatgacaagaatggatatgcatttctgtatgatgttgtcactaaagaatacattgattttaaagttcccgattccttaacgactactttgtacggtatctggcataatggtggcgatcattatactatggcaggcggttactcgagtgctaaattaggggagataagtcaggctttccttgtggattacaattccaaaacgaggaaaacaactaatttaaaatcgtttagttacaagaatgaaacgattctgtctgtagttacacattttgaagggatcaccgcatccaaagacaatggttatcatatgacgtctgactggattagtgttaacggaaaagatatgggagcttcctttgttgctgtaaatcgaaattcagatggctcatttggagaagccaactggatagatattgattttccggatgctaacagtacaagtgctaataccgcttatcaaaatagtattttaggtgtttatacaatgaaagatgattcgggtaccgtaacagtgtcttcgtatgttgcaaaagttcatccttgaaaatagagcaataatcatctaagttggaaattttaacgcaaagcgcgctaagaattttagctgtatacactcagaaaaacaaagttcgcaaagctatacctagacaaagctttgcggactttatgttttttatataaaacctacgcataaaaaaacttagcgtactttgcgttaaatgtcaaagtatttcactccatttgaggctgaaaattttaacgcaaagcacgctaagaattttagctgtatacacttagaaaaataaagttcgcaaagctatacttagacaaagctttgcggactttatgtttttttatataaaacctacgcataaaaaaaccttagcgtactttgcgttaaatatcaaagtacttcactccatttgaagcttaaaattttaacgctaagcacgcgaagaattttagctgcatacacttagaaaaataaagttcgcaaagctatacctagacaaagctttgcggactttatgttttttatataaaacctacgcataaaaaaaccttagcgtactttgcgttaaaaagccaaagtctgcaaagcttttcttttataaaaaaagaaatcgtctcaagttttaccttgagacgacttccttcaatttcatacactcataaaaataataagcgtttcactagaaaaatattagtttttaattatttttctagtcactacttttcctttttcagagataaactgaacgatgtaaattcccggaacttgtttggagatatttacactaaattctttttgtttatttgttttttcttcaaaaacaaccgtattgaaaatgcttgttatttttaatgttccctgctcctcactatttacggctattttaaatataccgtttgttggatttggatagatggcaaccaaacgggattcaggagcttcaacaagtgacgtggcgccggctttagtattcggtttagcttttaccagtgcaaaacgctctcctccttcaagttctccgcttttagcatcttcctgaacaaggtctaaggtaatttgctcttcaacagggaaatcttttgccactttgaaatcaaatgtaattccgaaagtttcatcaatatcaataggcaggtttgctatggatgcttctctggaagtaataagaattttatttttatctaaaatctgtacgcctttcagacttccattggcctgtgctctttcaaatagttttggatccagtgtagcttcgactgtaccgcccaaatcaaagaaattattcttcaactgttcgttaaatcctctgtctataaatctcacgttgatatttttagatctgattcctctgatgaatactgcagttggaggaacaaaatcagtcgtgttcaggttgtaaacacttaaatttttccaggcaatattgttgttgtttttggtgtttacacctatacccacattagtttgttcattaaacatcggatcttctgatgattctattcttgccgctaaacaaaaatggtgtacatcgtaagtgaaatcagtaggatttggcggataccaaggaataaccactgtagcatttccacctgcagcaattgccgggatagctacctctccgatataatcaccatgcaatacaggtcctacataaaaactaacaaaattggttggccatgttagtcctgaagaagcttttgcaaaatacaatttcactttaccggaagcactaggaacggttcctttattagtaactttaacgtatactccgtttggagaacttagtttaaactcaggattttcatgtgtagttcctccatcaatggtttgtcttacccagatatcatcactgatccacataggtccagaatccggatttggttgtaatcccacatcaaacggtctgtctttgatgtaaagatccggtacggtaattccggttaccactgttgaaaaattctgacttccattgaccaaacttcctttatgggttacggttatggtatacgttcccgctgcaccaacaattctgatgcgctcaaaagggtctctggtattgtcacccaatccgtttgttgttgcagtaagcaatcggtatggaaaattagttcctgctccattagtcacgcgaatatctaaatcatttatcaattttgctgtaccaatatttggtgtacttcctgaataagcaacaccggcaggatctgtccacgaaatagaagcaattaacggattaactccgtctgaagtgaccgacaatgtataagtacccccattcaccagtgtactttcctgaacaattgatgctgttccgttttttgtaatggtttccgcagcaaattttgcgttcagtaaaccccatccaaaaattgcatcaggaccaacagctcctgcatcgtctgcggtatggagcgccaatccttttagagtggcagcgcgcataaagtttccggtcagatttttataatgctgttgcaataaaagtaaagttccggttacgtttggagctgccattgaagttccgctggcattaccataactactattagttaatggtgttaccggatttgtaagtgtggctgtggaataaacagaggctccgtttccggcaagatccggtttgattctcaaatcgtctgtaggcccctgactgctggacccgctaatggtaacacttgttaaggctcccgttgaacttatcacagcgtcgttagcattagcaatcaccagattgtttttagaagtcgaaaatcctgtaagtttatcataagcggtaaaaccacctaacggacttgtatttgcagtgttatcaccgccatcatttccggctgatttcacctgcaggtaataaggagcattaaacatcagattgtcccagtctctggcagtagtttgataagcaccaaactgccacggcgctatcagaactgttccagcagagtttcttgtagcccacccataagaatgattggagatcagcattccgtttgccgctgctgtagtggcttcagtcaaatcgttagtccattcgttcgttctggcatttccctgaaaggccattcctttggatgccgctacagtacctgccgcaacaatagtacctgttacgtgattggcgtgctggctgttgttacttccggcaacaatagtcgtaaccccatcattaatggacactcttccgccaaactcattgtgagtgggaagtgtagcaccgccatcccaaacataagccgtcatgttttgtccgttaagattcaatcctaaaccaccaccggaattcaaataatttgcccgtgtggattttgccgcatttacattttcagtagcaaaatagatgggcgttttgccgtcggcacttacatctactaattcgcttgtagttccatttttgttactaaaggaagtacgccagccattagccttagcaaggttactaattctttgtttcttctggtccgcctctgtttgatatctctgactcagagactgtagttcagacacgttacttccggacctaatttttgcaatatcattctgagtttgtgcgtaagtggctccacagacacacagcaacataattttgtataaatttttcatataatttgatttaaggggtgaatcattctttatatctcaaaaatctttacaactaaaaaggggggcttctggtttccataatttgaatggtttaaaggttaaataattggtagaatattgtaaggtttaacgttgcagtaagtgtatttgcacaagtgctatttacctacaaatacaatgtaatttgtaggattttattccaaacacaacaaaactcgttaaactaagcgaagtacaaaagagtataaacacctgatttaaagatatattaaaatgttaaatatataacaattttaatttcataaaaatattggatgcttttttttaatgctaaaaaaatggaaattctttttaatgataaatatttttcaaaactaaaatgctttttaaggactattgaagtatttttgtatgagaatcgaaagttatagaaaatatgaaaagaagaattgttttggcagctgcttttatgggaatgttagcgatcattttaggcgcttttggggcgcatttactgaagaaatacttgtctatagaagaattaaatacttttgaagttggtgttcgttatcaaatgtatcatgccttattcttactttttctttcgacccgaaaagatatcgccgagaaaacggtgaaaacaatctacaatttggttgtggccggtgtgctgctttttagcggatctatctatttgttagccacaaaaagtctcacggtttttgattttaaaattatcgtattcgcaactccattgggtggttttttattaattattgcctgggcgttattatttgttacgattttgaggagaaaatcataaaataccgaataaaaaattctatctaaaaattaatctttaattttgtctcataaataacatataatcttgtttatgtgagtttccattgttttttgctttaatgcataaataatataacaaattcatttatagggttatagaaaaatgaattagaggcatttattttttgttttattcattttaggagtttaaattttaactaattagcataaataaaagtgaaatttaaatttttttaaaggtttaataataaattatataattttgcattctcttaaacatcacacacaactaaaaatttatggacagtcacacagttttcacgcaatcgatttcgctgaaagaattaggaattgaaaatgcaaaggttcgatatcaactatctgcagatgaattacatgcgatcactttgcaatcaggtcaaggtgttgagaactccacgggagcattggcaattaatacgggcgaatttacaggacgttctcctcaggatcgttatattgtaaaagatagtattaccggagatcaggtttggtggggaaatgttaacatttcttttgaaccggatgcttttgaaagattatacaataaggtaacacagtatttatcaaataaagaagtttttgttcgcgattcttatgtttgttctgatgctaattacagattaaatgttcgtgttgttacggaaacagcatggtctaatttgttttgttacaatatgtttttaagaccggaagagtcagaattgactaattttactccggaatggacggtagtttgtgctccgggttttatggcagatcctgctgtagacggaacgcgtcagtctaattttgctattttagattttactaaaaagatcgcacttattggaggaacagggtatacaggagaaatgaaaaaagggattttctctgcattaaacttcattttgccggttttcaaaaatactttaccaatgcactgtagtgcgaatgttggtgaaaaaggagatactgcaattttcttcggattatcaggaacaggaaaaactactttatcagcagatccgcaacgtaagttaatcggagacgatgaacacggctggactgcagaaaatacagttttcaactttgaaggtggatgttatgcaaaagtaattaaccttacagaagaaaacgagccggacattttcagagcgatcaaaaaaggagcgcttttagaaaatgtggttttcaaagcgggaacaaacgaggtagattatgatgatgtttccatcactcaaaatacacgtgtaagttacccaattactcatatcgacaatattcagccaggttctattggacataatcctaagaatatatttttcttaacggcggattctttcggaattttgcctccaatttcaaaactgactcctggacaggctgcttactattttatctcaggatataccgctaaagttgccggaactgaagcaggggttacagagcctcagcctaatttctcagcttgttttggagcaccattcatgccgttacacccaacacgttacgcagaaatgctaactaaaaaaatggaagaagctaacgtaactgtttggttgatcaatacaggttggacaggtggtccttacggaacgggaagccgcatgaagttgaaatacactcgtgccatgattaccgctgccttaaacggagaattggataacgtaaactttaaaaatcataaagtatttggaattgcacagcctgaaacttgtccaaatgttccaaatgaaattttagatcctagaaacacttgggaagatcctgagttgtacgacaaaaaagcagttgaattggctcagaaattcaaagctaatttcgcgaaatttgaagaatttgccaatgccgaaattttggcaggtgcaccgatcatagaataaggaagattactaattcaaactaaaaaaagctgttcgttatgaacagcttttttgtttggttttcagtctcagtctcagtctcagtcttcagtctcagtcttcggagtcttcagttacagttttcagtcgcagttaagaaactgcaaactgtgactgcgactgctaattgcgactgtaaacttatttcttctcatcaatacgtttctggatcaaatcccaggcatagtagtgaaaggtcatcccgttactcatggctacgaaaaggccatttttaaagcttccgcctagattgatgctggtaacatcggcaccatcacattcaatagtcgatgttggaatttctgctaaaagtgggtagctattcggattgccatttgctccttcccttgggtacaccataaaagtgttcgcttgctggttggagaccagaatgtatccggtagaatctgttttcttgtaaatcgcgattccttcattgtctcctttaaaaccagtttttccaaaaatggcgagttctttgttgtcgtttaaggcaggatcggctttgtattttctgattccgaattgttcatcgcaatacaaaacagtgcccaattcattatctactgcaatagcttcgatttctttcttcccgctgtaggcaccaaactttcgaacgacttttgctgttgccaattttccatttcctgaaagttcgtattgccacaagtaacttcctgatggtcctgattttctgcctacaatagcaaagattttgccatccgtttttcgggtatacaaagcaattcccattggatcacgtaattcttcaccctcgaaaacagcgattccaccattgtcaattgcttttaaatcaggtaaactaaagattcttattttgtttgattcacgttctgtagtaacagcaacatccactttttttccatctacgattaagccgtaagcgatatcaacattgttcgggcgttttaaaacttcagattttgcaatgatttttccttttaaatcaaaagcgtacaaagcaccgtctgtatctttatccgttcctataataatgcttttagaagaatctgttgggtgaatccagatcgcaggatcatctgtgtcgtgtggcaaggcttcggtaacaacggttggttttacagcatttgcagctacaggtgctagtttgtcctctttacaagcgatgaataaagtgcttaaaagtataaaggcgagtatcgttttatttttcattatggattcgatttttaataccattagacagaactgttgggctctgtctaatgtaaggattttaggtgtaaattattataagtcaagtttcaagccgaaattgtatcgggcctgatagtactctgcttgtttggtatgtgtcttaactccctgatagtaacgcaaaggctgattggttaagttgttggcttcagcaaaaagacgaagctttgatgtaattttgaatgaagcgtttgcgtctaagaaaaattgtttatcgtaataactgtctttataagattctgaacccaactcatctaaataatctgaagtgaaattggtcgatactctggcagaaaaacgtttgttttcccaggataaagagccattaaacatatgcggagtggttcccggaagactgatgttgtttctttcgtttccatcttcatctgcgattccttttgctttagatttggtataggtatagttcagataaataccaaatcctttaaggaatttccccggaaggaaatccaactgacgctgaaaagcgacttcaaagccataaacatcaacagtatctccgtttctggattgtaaaaacgaccagttttcacctgccggaattggatttgcctggtttgggaaatcagcagcaaattttgcagcagtgtattggttgtcgctataattgtaaatgaaattttccagttttttatagaaaacacctcctgaaattagtccgacagatttgaaatagttttcggccatgaaatcataattgtacgagtaagtggcatcaagatccgggtttccggctgtaatttctttttcggcagcaatattgtttacatatggagccaaagcataatagtccggtctggccaaagcggttgtagcggcagctcttaaaactaaatctttggtcgcgttgtattggaatgaaatacttggcaataaattagtgtaagagttggtcgtattgatttgactttctaatttttcttcatccaaaacacggtttccggtataatcaatatgagtgttttctactctaaaacctaaaaccatagacagtttatcgttaaaatcctgatcccatcttacataagcggcataaatgttttctttggcattaaaatttactgctaagaattctgatggatctgcttttttgttgaataacgcagcgttgtttaaatctaaacttcctaaaaagttagctgaagcaaaactacccggaacatatttactacccggattaaagttttgaccgtcatagaaactgtttggaatctgcgacagcaaagccatatcagtattgattggtgtgtaggcaaagaaattgttgtttctttctttttctttcaatcgaagacggagtccggttcttaatctgcctttttgagatggtataatagtaaaagggaaacggatattaatttttgctccaaattcactttcgctggtttcatttgtattttcggtagccgtttggaacttgaatttgtccagcgactctccggtggttgcgattaacggaaattcgatatcagatagattctgagttaagtccaaacctttttggcggtattcgatataacgttcttccggacggtattctctggcttttgcataattggccgaccagtccaaatccagtttagagtggattaaatgttctccacgaatagaataattctgaacacgttggtcttctaaacggctgtttttattacgattattgtcagacccacctttggtttgacgttttacacggcctttaaaagctgtaatttgtccaccattataaatgggctgaatatcatcataagtagttctgaaacgattttctctatcgtctctccagttgtaaatggcattggcaaaaatggtgttattttcatcaaatttgtaatctaatgccacagatccgctgcgacgaatacgctgtacatcgtattttctaatctcggatgcctgtaagtattcatttccgaatttatcttttacccattcgttctcaatattatcagatccgtaattcacattgttataagatccgctgaaaacggctcccagtttattgtcgagaaaacgatttccataaaccagtccggcggtataagaggcgtgttcacgaattggcagataacctccggccagtgttgcagaaattctctctccatttggtgtagctcttgtgatcaggtttacagaacctccaatagcatctgcatccatatcggaagttaaggttttgttgacttcaattgtcgaaatcatatccgatgggatcaaatccatttgtacatttctgttgtctccttctgctgatggaatacgatctccatttaaagtaacagagttcaatgaaggagcaagtccgcgaataataatgttacgggcttcaccctgatcgttttgcattgtgattcccggaacacgctttaaggcatccccaacgttggcatccggaaaacgccccatttggtcagaagagattacgtttccaatgtttttgttgtttttttgttggttcagggcttttgcctgaccttttaagatgtctcccaccacaacttcgttcaattcagttcccgaagttttaagcgcaaaatcaattacgttgtttttaccctgttccactgtaatttcttttgtgagagcggtgtatccaatatattttacctgtaactggtaggttcctgcatttatgctaagcaattcaaaatgaccgttgtaatctgtaacagtgtatttgttctcacctacaatttgaatcattgctcccggtaaaggaagtttgtcatctgtatccagcacttttcctgagattatggccttttgagcataaccagataaggctaaaaacagaagtgtaattactaaataaatttttttcatttgtgttttagtttgatttgctgcgaaactagaacctgaatgttattaaaggacttaaaaaaaattaacatagtgttatgattcgtcatttatattaaaaatagattaatgttgaaataacatttaaatgagaaatgttttttaagaagccaacttaaaagaaatgaactatttaacttagaatttaattttttggcgctaaatttgccctatcacaggagcccaaagggcggactgacgaaataatcatcaatcaaaaatcatcaatcatgttaaaacaattttttatcctttgctccggagccgatcgggatctgctcgaaggctgttcaaatggcgaacaaaccaaatatgttggtattggcgccacggttttttttactgccgttatggcttttctggccagtgcttatgcgctttttaccgtttttgactctctttatccggccttagcttttggatttgtctggggcttgctcatctttaatctggaccgatttatcgtttcgacgattaaaaaaagggatcgttttatggatgaatttattcaggccactcccagaattatattggctattattatagcaattgtaatttcgaaacctctggaaattaaaattttcgaaaaagaaatcaataccgttttattgaaagaaaaaaatgagatggaattggcgaataaaaagcaggtaggtaattattttaaatcagatttagataaaaacaaggctgagattgctgctttgaaaaatgatattctgacgaaagaaaaagaagtaaatgctttgtactctacttatatcacggaagctgaagggacttcgggaacgaagaaactggggaaaggaccggtttataaggaaaaacgagataaacatgatgcggctttaaaagagcttgcagctttaaagactactaacgaagcaaaaattgccgagaaagaaaaaacaggaaaacaattacagactgacttagataaaaaagtcacgcagacacagcccatcattgaaggttttgacggattaatggcgcgcattaatgccttgaataagttaccttggcttccttcattttttatcatgctgttgtttctggcaattgagacttctccaattatagcaaaattactggctcctaaaggcgaatttgatttcaaacaggaagaagccgaaacggctatgaaagcgactttggaacaaaataaataccagcgtgaattattggtgagaaccagtgccgaaatgcacgataaagtatacgctgatattgccggagacagaggtctttttgatttacagcgtaaaaatgcaaaagagttactggagctgcaatcgaatagttttgtagagaagcagaaagctactttgtaagtcgtaaagtcgcaggtcgaaagtcataaagtaaaaaagccagaaatagaaaaacttctattctggcttttttgttgatatcaacaagagcattaagactttaagactaaattacatatagcttaaaatctcttttttataggtatcatattccccttgcatgattaaaccattgtcaagcagttttttataattctgcagtttatcaaaaagttcttctttggataagtcgcttaatttacgttctcctgtagaagctggagcgggttgaataggttcaaaagtttcataaggagtagcggcagcaggcaaaatctcagcaaaactggttacttcttccgtttcaacttcttctacgtcgtcttcaaaatcatcttcaacgattggtgttgcttcagttattggagtctcagaagcagtaggattttttaacaaatccaattgctctttagcatatgtataaatttttctggcctgagttttcggaatataatcgatcgaaatggtcagatcagttttggtgccaaatgagaattcagaacctaaaatgttttcttttacaaaagtgcttgttatatcatcccaggtataatctgtaaaatccattgataaacctaagtttttaggtttgcagataataatacgtttgttggttaagattatgctatccggaaaaacagtaattgcaggttttttttgaaccgcaatgtacccgatttcttcgtttttcatcaataaatcattgagcttcgaagtgattttttcaatcgctttagggtcttgttcttcgttcagaaattttttaaattgttctttcatgattgataagttgctaagttacatggtaactgagttgctagttttttggtcttatgctgcaaatgtaatgcctaattttctaattcgataatttcattctgaattttctttgtcaaacttttgaaaaccaattcatacgaatgatcgatcaattctttaacgaaagcggttggtaaacttccgttgagagcgatcgtattccagtgcactttgctcatatgaaatccgggtttgatttcttcatattcggctcttagttcctgagcacgttcgggatcacattttaagttaaccgagggttcgtttttttcccattgtgataaggaggataatgcgaacatttttccgccaactttaaaaaccaaagtgtcctcgtcaaaagggaagtgctcgctgactcctttttttgaaagacaatattcgtagtacgtttccagattcatattattttttatttaccaatttcacctaaatgtgtatacttaaaacctttttgatatttcaaaccataaccgaaaaaacgatccatcgcagcatgagagaacaaaatgattccgataagttggatgtattctatttttaaataacaacctaaggtataaattattattgcaattcctttatggtggaacaggttgtaggataaagcaccaattttggaattaaatagataacccgtcatagaaaaatcaggagccagaatgaagactaaaaaccaccaccactgatagtttaaaaggctaaataaatagattccgagaataaacattcccagttcttcaagtttgagtattgttttcatgatatcttcttttccatcattttttcgggatgttgtaaagcactaaaaccaaatttctcatataaaaagtgagcatcagtggtggctaacctccaaatctgaatttttttgagctgtggatcgttcatcatgtgttctaccaaaatagaggaatatcctttgccacgttgttcttcggtaataaaaacatccattacatagccaaaaacaacataatcggtaatgactcttgcaaaaccaatttgttcatcattaagataaatgccaaaacaaaccgaagcatctatcgttgtttgcacctcttcgatagttcttccggcagcccagtaaatgtctttcaggaaattttggataaatggaacatcaagtttgcttttatctgttgaaacggttatcattttagaggatcgattttatatttaagactttagcttgtaagatttgaaatctgaaataatattggtttgcttggacttgcatcattttcaaacgaagcaatttggagatttagtatataggctccgtcttcgatttcatccgaaacaaaaatcatttcggtaatggttgcgtttaatcgtgcgtcggaattgagattgtgggtgtcttttacattccaaaacgctttgtgtgccagtaattttccctcatcatgttctctgtcaacacttggtaaatcaatcaataaatgctgaatttcgctttcgcggatgaaaattgccgcttcttctgataaatagggcggattggtattggaatatttcgttgattttttatccttttgatttggaagcgttctaataattaaagcttcaattgttttgctgggcgaagccaaatcacttgtcccattgagcgaagtcgaagtatgtgtctcattgagcgaagccgaggcatttgtcccattgagcgaagttggagtatgtgtctcattgagcgaagttgaggcatttgtcccattgagcgaagccgaaatatttgtcacattgagcgaagttgaggcatttgtcacattgagcgaagccgaaatgtgttctttcgtaattaccaaatcatcacccattttttcgggctcaactgtaatcagttgggcagtaaagaaaaattgctttaagcactgattgatactgaaaaagtcattcgtaatatgtcccaaacactctgtatgcgttccatggccgtgagggttgaagaaaatattattgaaattagtagatgattttccttcagagaccttcccaatccaatcaccaaaaacgactggttcaatgactggtttttcgatgtaccaggcaatcgggttttcgtcagtattcgttaacggaattgaaatatcaatgggttttgataagtcgatttcgaagttgttgatttttgctatcatgtttgtttaaccgcaaggggcgctaaggtttacgctaagaacgccagaattttttattaaagattgtttgctactctcctgataccattttttattaaacaaacattgaaattgattaataaacctaatttacaattggttagttttaaataagttaataattgagcaaaatgaacttcatttaaacaatcgactgactttatctccaaaattaatttattttctactaaaatatctaaacgataaccaatatctaatttattttacacaggactatttaactaacatacactatagaatttagtgtacacgaaaaaatattattatgggttacgatttatttacaaagctgaaaaaacttaaagttactgtcaaagtaataaacaataatctggatgttaaagctcccaaaggtgttttaaatgaagaactattaaaggaaatcaaatcaaaaaaggaagaattaattgatctggtgaataaatatgccaaagatcaggttaatgaaagccatgctattcctgtcgcaccaaaaagcgaacattacccgctatcttcttcccagcttcgattatgggttctaagtcagattgataaagcaaacttctcctataatattcccggaattcaggttatcgatgaagcattggattctaatgcttttatgctggccattcgtgatttgattcatcgtcatgaagttttaagaactgtttttaaaaccgtagaagaggaagaagtaagacagtttattatagctccggaagattttgaatttccttttcagcaaatcgaagtaaacggtgatgaagaaaaattaaacgaaatcctgaccggtataagtaatacttttttcgatcttgaaaaaggtcctttattcaagggagctctggtaaaagttaccaacgacagattcgtttttggatataatatgcaccatattatcagtgatggctggtctattggtatcatgattaatgaattgcttaaaaattatgatgccagacgaaaaggagaaaccgtacagagtcatcctttgcagatacattataaagattatgctgtatggcagcaaaagcagttagcagacgaagtgttccataaagagagaaagtattggctgactcatctggaaggtgatttaccgatactatcacattttggagatttcccccgtccggctatcatgagttacaatggaaatgtgacaagaaaggatatacccgcagctttgtatcaaaagtttaaatccttttgcagagaaaattcaggtactttgtttacaggctgtctcagtcttatcaatgtactattgcacaaatacaccgaacaggaagattttattgttgggagtccggtttcaggcagaacacataaggacatggccgaccagattggattttatgtaaacaccctggcacttcgaacacaattcggagccgctcattcttttgaagaggtttttcagaaaaataaaatggtaaccttaaatgcaattgaaaatcagaattacccttttgatgaattagtgaatcatctccacctaaaaagagacctcagtcgtagtgctttatttgatgttatgattgatattcagaacgaaaatcagagcgacgatcaaaaagcaggtacatcctataacgaattattaaacggaggggttagcaaatatgatttaacctttacgttcatagaaaagtctgattccctgacggttgaattggaatataataccgatatttttaccggagaaacagcagtcggattcctaaaagatttagaaaatatagtagaagcagtagctcaaaatccggtggagaaaattggctctcttcctctgaatataaataggagaacagctcattctaaattagaatcccctgaagaaattgtgataaatgaagagataacccatacgctgccgtcaactccgcttgaaaaagcattggcggggttatgggaagaagttttaggaatttcgcacatcagtatggaagataacttttttgatttgggagggcatagtttaaaagcttccaggttaattagtaaaattcataaagagtttcgtgtaaaactacagctaaaagatttgttcattcatacaagtttagcttctcaatacgacctaataaccaaagaacaagaggttgattatagtgaaattcctgtattggagaaacaaaatggttacccgctttccataatgcagcgtcgtttgtggatcctgagccagcatgaagcagccaatatcgcctacaacatgtccggggcttatgtatttgaaggggaactggatttcgatgcgttagagaatgcatttgtacaactgatagaacgtcatgaaattttaagaaccagctttaaagaaaatgatcaaaaagaagtgttgcaatacgttacaccacttgaagacattctttttaccataaaaaatactgacctgagccataccaacgaaacagttctcgaaaaacatttgttcgaagatttgtcagctccttttgatttgtcttcaggaactttgttaaaagccagtatctacaaacaatctcaaaaccgttgggtattcagtaccgtaattcaccatattattagtgatgcctggtctatagaaatcattgtaaaggagttgttgcagctctacaacagtctggtaaccggcgttccgtcagcattaactcagctgcctattcaatacaaagactattcgtcatggcagcttacagagctaagcggtttcagattggagttgcataaaaactattggctgaatcagtttaaaggcgatttacctactttagatttagcagcaggaaagcagcgtccacttataaaaacatacaatggagggttgtatactaagatgattccccgttctttaagtgacagattcgatcagcttcttaaaagccaggaaactactttgttcatgggattacttagtgtagtcaatgtactgttttatcactatacccagcaggaagacattgtgatcggaagccctgttgcaggaagagaccacgctgatttagaaaatcagattggtttttatgtaaatactttggcacttaggactcaattttcgaaaaaagacagtttcaatacgatcttgtctaaggtaaaaaaagtggttctgggagcacatgaacatcagttatatccattcgacgatctggtttcttccttggatattccaagagatatgagtcgtaatcctttgtttgatgtacaggttattgttcaaaaccaacaagtatcaaactccaaaggaatggagaatttatcggttaacgaatatcagggaaaattaccggattccagtgtgtttgatttggtttttaattttgctgattctgaaaatggtttagctaccagtatcatttacaatagcgatgttttcgattcagaaagaatagaacaatttggaaatcatctggagcagctattagcagctttattgcaaaatgcagaactgccggtacaggaattgaaatggttactaaaagaagaagaacaatatttacttgacttcaattcagaaacattggactatgatacagctaagaacgtcttagataggatcagagagcaggtcgaaaaaaatcccgaagccatagcggtatcttttgaaggaaatcaattgagttattccgaattggataaacgttccaatcaactggctcattatttattggaagtgtaccagatacaacctaatgattttgttggaatgatgctcgatcgttccgaatcgatcttcattggtcttttaggaatattaaagacaggagctgcttatgttcctatagatcccgattacccggtttcccgaaaagaatatatcctgaaagataccaacgtaaaggccctgctcacacaatccgattatatgtttgatctatcgtattatgagggcggaatattcgccatggatgtacagatgtacagtctgacaaattcaacaaccgctcctcaaataacagttttaccggatcatttggtttatatcatttatacttcgggatctacaggaaatccaaaaggagttatggtaacccatggcaacctacagcattctttagcaccgcgaggcaatacctattcgccaataaaatgctttttgttattgtcttcagttgcttttgatagttcagtcgcggggatattcagtacattaactacgggaggaacattgtgtatcaccagcagctcggatattgctaatgttaattttatcgcagctcttattgtttctcaaaaagtaagtcatttattaacagtgccttcctactataaactgcttttgaatgccttatcagataaagaatcttctattgaacaagttacggtagccggagaaacttgtccgataagtttaatcgaagaccattttaaaagcaaaataggtcaatcaggctgtgatttgtttaatgagtatggtccgacagaatgttctgtttggagcagcgttcatcaatatgaagaaggaaaaccggtgacagcaactatcgggaaacctattgccaacacccgtatttacatcttaaacgaaaaagaagatttagttccgctaggtgtgattggggaattgcatattggaggtaacggcgtaaccaaaggatatttaaacaattcggaattaacggcccaaaagtttgtaaaagatccttttagtgaagcaggtttaatgtataaaacaggtgatttaggcaggtggaattcagccggggaaatcgaatttttaggcagaaaagacaatcaggtaaaagtgagaggatatcgtattgaactgggcgaaatacagtatgctgttgaacagtacagccatatagaagcagcggttgttttagcaaaagaaaacaaaacgggtgataacgaactgtatgcttatttgttagaaaaggaagcaataaacatctcagagttaaaacaccatttaaaagacttgctgccttcttatgccgtacccgctcactttattactttggaagcatttccgttaacaccaaacggaaaaatagataccaaggcactattagaaataggaggctcagaaacaggaagaggagcagcatatgcagctccgcaaacagcagaagaaacagccttagtaaacatatgggaaaccgttctggacaagaaaaaaattggtataaatgatcggttttttgatttgggaggagactctattaaagtgttgaaaattgtgaatggtatttataacgaaatgcagttggaaattacaatttcagatgtctataccaatgattgtatctcgcaattatcagattttataaaaaacaacagagcgtcactggacgttaaaaaaacggctgttactggaaccgggaaccagggattagaagctattgatttcataaagaaccgtgttttaggatctttaaatgaaaacgacgctgatgccattgaagacgtttacccaatgagcgacattcaaaaaggaatgatctatgagtcattgaaatatgaaggagcgagtatatatcacgatcagatgatcaatcaccgcgaatttaaagattttgatatttcggttttcagaaaagccatgcaactagtgactgaaaagcatgagattctgagaacaggatttaatttacaggatcacgatcaggaagttcaaattctatacaaacaagcagaaataccggttgtgtatgaagatttatctcagttgcagtccttaaaagaacaggaaaaagttattgcagcctttcttcagtcagaattgctccatccgtttgatgtgactcaggcgccattatttcgtatggctgcttttaatctgggcaatgatacaattgtttttgtttcgcaatgtcaccatgccattattgacggctggagtgattcattattactcacggaaatcaataatgtataccttaaattacttgaaaatccttcgtttaaacctgctaaattacaatcgagtcataaggattatatgctgcaccaattgcaggacaagcgaaaggaagagactgcagcattttggactaatgaattaaacgattacaacagacttgatctgtttactgaaaaagaaacagacgattttaaattgttcagctttgagaaaaaagagttagcaaaaattgaaagtctaaaaaaggcttacggtatcagattaaaagaactggctttgagtgcctttgtgtatactttaaaattatactcgtacagcaatgacattacaattggtctggttgtaaatacaagacctgccttaccggatgctgacgaaatgttaggctgttttctaaatacaatacctttcagagttgaagtgagtagggatttaagcggtgaagatttactgttgttagtaaagcaaaaactgatcgaagtaagtaatttttcggatatgagtttggccagtatcgcttctgttactaatgagattaaaggattaaacaatcctttctttgatatcattttcaattatgttgatttttattcttacgatgcattagaagaacaatctaacgaaaaagaagaatcatatctcgagaatcaggaattaaccttaaacggaaaaggagttaccaatacatatttcgattttaccgttaacaataccaataatgcagcattgtttgactttgcacaaaccagagcgcttgttaacaaaattgaattgtctgaaatagagtccgtgtacaaaaaagtgtttaggcacattgtagagcatccggaatcttcattaaaagaactggatcatttatccgatgaggaaaaggaaatttatgagaataaaaagcagcatgatactgtaaccgaaaacgaagatcagaccgtattggatttatttaacagacaggtccttctaaacccaggttatccggcgctgcatcacaatggtgtaaatatgagttatgccgaattagatcagaaatcgaatcaattaggaaactatcttaaaaaacaaggtatagggaaggaagattttgtggcaatactactggatcgctctatagaaatgctggtttcaatttttggaatcataaaagcgggagcagcctatgttcctttagacgagggttatccgcagcaaagaatcgattttattttaaaagatacagccgcaaaagccataatttctaagccgtctcttttagaaaacttttctgaagaatcctttccaaaaacgatattaattgacacagactgggataccatctcgcaggaaagtgtagcagaaaccgatcataatcttacttcaaacgctttaatatacagtatatacacttctggaacaaccggaaacccaaaaggggtttatattgaacacaaaggagtagtaaatctggcaaactcgttaataaaaagatataaaatacagaaagaagagaaaattttagctttttctaattatgtatttgatgcttcagtggaacaaatttttattgcactaagcagtggagcgactctagtgttatgtgataaagaggatttactggataatgaaaaatttgcggaccttttgatggaaaaagagatcacacatatagatgtaacaccaacttacctcgaaaatgtgatcccaaataaataccatctgaacagagttgtggtcggaggtgaagagtgctcaatagatctagccagaaaatgggcggctcacacggacttctacaactcttatggtcctaccgaaaccactgtatcttcgacgatatatgcttacgacaaagaaaatgataaagatctaaatcgtctgccaattggaaaaccaattgaaaatacgactatttatatcttagaccatgctttgcaaattgccaaaaccggagtcgttggtgaaatgtatattggaggtatcggagtttccagaggatacatcaatcaggaagcacttaccaaagagcgttttgtgaccaatccttttgccaaagaagaaaccttataccgaacaggcgatttgtgctgtaggttatcggacgggaatattcagttttttggcagggccgatgatcaggtaaaaatcagaggctacagaattgaattgggcgaaatcgaaaatgcatttcttcaacaaaaaataacaacttctgttgcggtactggccaaagcaaacaaattaggagaaaaagaaattgtagcttatctggtgcctgatgaacattatgatgtaaaaaacatccgaaccaggttaaaaagcattttaccttatttcatgattccttcttattttgttccgatagaagaaattccattaacaaaaagtagaaaagtagaccgaaataaattattagccatcgaaatacacaaaacggatagcctcagatcgcttgttccgccggaaaatgaaaccgaaaatacgatccttcagatatggcaggacattttagaaaaaagagacatcagtgttatggacaatttttttgaaattggcggatatagtctgaaggcgatcaagctaaaggcaatgctaagaagaaaagtaggcttagacatttcgataaaagatctttataacgcgccaacgatcagagaattggctcagggtaaaaaaacttccaatgctgcagtgatccatttatatgtcggagatcctcaaaatacaatttacttcataccgccaattctgggtaattctataatgtatcatcctttggcaaaagtattagggaatgagtttaattcgattggtttgcaatacaaaggattagagcctgaggaagagctttctcagtctattgaacaaatggccgcttatttcagcgcagaaattaaaaaacgtcagagcaatcagccgtttgtggttttgggatattcaatgggggcttcaattgcctttgaagtagttaaagaactggaaaaacaatacgatgccattgaattggttttggtggacagaccaacgtctctaaatgaaagcaacgatacggagcatattgacgaacaggccaattggctgcttgacgaatatcagaaggctattgatctaagtaaagaccaaaaaacaagcgttttgtcttttatgaaaaacaatctacagattgataatgaatatacacttcagggtaaaatctccagtacgatatatgttcttgaatcttctgagaatgaattaaaaagcaatatgaaggactggcagaattataccaatggagcgttagtacaccattacctgccagggacacactgggaggccttcaacgagaacaattttgacaagtacgttgaaatttttaaaagtagcattcaaaaaacaagtatagaaaccaactaaaactgtaaaactaaataatcaaacagaatggaaaacacagaaaagtattattttaaaccaaatgtaattattggaccattagtagataaatggtatgcatggacacacttaatttctcctgccacagcagcaatgaacattgtcgaaaggcatttaaaaataatgaactcctatattcaggctcctgcaattcatgaggcagccgtaaaaaatcctaaaatgttaggaggaccttttatggactatgaaacccgaagagtagaggaagtcaaagaactaaaagctgaaattctcgaaaagcaggcaaacgcaatacaattatcagaggcgataaaagaattggatcagttgctaaaaaccaaagcaaaaggagcgtctttagaacctttgtacaaagaagttccggaaatattaaaaggatatgtagaattggtttacgatttaaacaaccatccttcgtatcgtttctttgagtctttattatacaacagcccattctattccaaacattctcaatctatttctttatgggaaacactaaatgatgagcgtccattttgtttgagtaccccacaattagaagatcctaaggtattacagttggatattccgtttgatcataaaggaattgatacgttaagcagaatgaagagaaatccgggatctattgaggccgttgccgaagaactgggcgttcgcgaagatcaaatggaactgtttaaaactttcttcaccaaaaaagaacatcccgcttatcaaaaatacacaggagacaaagccagaatgcgctatttgggacatgcctgtattttaattgaaaccaaagacgtgagtatccttgtagatcctttaattagttattacggctacgaatctacagtagaacatttttcagatattgacctgccggatgttattgattatgtattgattacacacaatcatcaggaccatattgtattagaaactttattgccgttaaggcataaaatcaaaaatctaatagttcccgtaaccaccagtggagcacttcaggatccaagtatcaaattagcgtttcaaagtatcggatttaaaaatgtcatagaaattgatgaactggaagaaataaaatttgaaaactgtaccattacaggacttccgtttacaggagaacacagtgatcttaatatcagagcaaaatcatgtttccatgttgcgatcaatgagctaagcttcttgtttgttgccgattccagagtaatggaacctagattgtacgaacatattcatagagttaaaggcgatgtagatgtattgtttttaggaatggaatgtgccggagcaccgttaagttggctatacggctgcttaatgacagaggcgattaacagagaagacgatcagtccagacgactggcgggctgcgacagcgaaagaggtttgtcgttagttgatatttttaatcccaaagaagcttatgtctacgcaatgggaatggagccttggttagaattcatcagcagtatcaaatacacagaagaatctcttgccattattgaatcaaaccgattgataaaccactgtgcagataaaggaatcatcgctgaaaggttatttggagagaaagaattgttatacgattatgaattaaaaaatgaattagtaataaattaatttcaagtctgttgggtgaaattgaacaaaatttaattttaacacatagaaacatagattttactaccccaaaaaagaaggcaaagtagaaatatctttcttccacatagtttagtatgtatagattttttcgcattactaaagtactgcaataaattgcagggttttaaacccgaatctgagaccaataaaaagatcgaagaaaattctttttcttcatggcactatcgctattataaagaaaatagatttgaagtcgaagagtgcacggaatactttaattttctaaagaagaatgacaatcaagagacttgtaatcaaaaaaaaacgtattattatttagacggactccctgttgctttgtttcttcataatggctgtgccgataagaccactccatctaaactttaccaatttaaagaaggatttctttcagttctggctgatgttccaaacagcattgaaccccaaagcgaaaaatacacttataataaaaataaaaatctggtactgatggaggatatctggagtttgcaaaaagtaagtgaattagtaatgacttatgataaaaaaggctttcttaccacaatacaaagaaaatcagatacagctaaaatgagccactattttgaggatcgaattctaaacataacctacagcttttactaattgtctaaattagatttatctttcttaaattcgcttcaacaacggtaatgtttaatttctaactcctaacaagaaatggattttcagaataatgatttttcaaaaacagagtcattagaatcaaagaaaacaacttttatagtaaagtttttagggggccttatttttgcaggtaccgttttaggaataattaacttagaaataattattatcgaatctaaactttctgttgaatttaaaatttgttctgtagtactgtccgtaattcttttatcttttttggtgtattttgtagtaaaggatatgattattcaccaaaaaaacaaaatcacaaaagtaatagtggatcaaaatggtttgcaccattataaagatgaaatagttattgaatccctaacttttgagtctttatgtccaactcccgatctgaaaaattatgatatcgttttatcagcgggagaagatgccgctcatgatatttgtgtgtattacttcgataactccagaaacgtaataatgtataaagccattacattcaatactccgttttcaatacgcaatgcaaaagaattaaaaagacatttcataaaaggcattttaaaattccgatccgatttgaaagtttcaccaaaggtgttggatttattaaatttaaacgatttataaaattaaaaatatctaaaaattgtcccgacctgaatttatctcacaggattaaataagcctcccaatgtaaatttgttatgtaagtcgttatgtttcaaactcataaatttaaaacatttccttcttataagaatcttttcttatttgtaaaataaactcttctgtataaacatactcagaattatccgaattgttttttagagtactattgtaaccaaaaaatccatcatctccacaaattaatctaaagatgatgaactcttgaatattatttttattgcactcctccgcctaaggcgcggtataaatttattgctgcatctagcttttctaattttatagtcacaacttcaagttcgttttgtaaagaactattttgcgctacaataacctccagataagtcgccattccgcttttgtataaaagacctgcatctgcagttgctttttctaatgaaactgatttttctgttacaagcataatacgctcatctgcatattttagttttgacaaggcatcatttacttcaccaaccgcagttatgtaagattgtttaaattgaatcgctgctttttcttgttctaaaagtgcaacctgataggctgttcttaactctttctttctaaatataggctgtactaaatttgctgcaatcgatttggttactgatcccggaaaattaaaccaggtatcaaactcaaatgaatttacaccaatcgacggactcaaacttaatgttgggtacatcgtagcctttgctaatcctgtttttgcataagccgacattacagcatattcacttgctttaatatctggtcttctgcttaaaagcgaagctggaattccggccggaacctcaactgcaaattctgatacatttaagtttcctgcacgtgctacagtatttggatattctccgcataaaatctgtaacgcattttcctgaactgcgatattcgcttttgctaaaggaaccaataattcggctgtttttttctgagcttcactttggtttactgccagagaacttattgatcctgcggtgtattgtaacttcatcatgtttaaagtgctatcgctcaattcaatatttttctgagcaattttaagctgctcgtctaaccctaaaaggttataataagcttgcgctacctgaacaatgattctggtttttaatgccgaaaggttttctttctgagcaaaataagtagcttttgcgtctcttttttgcattgctgcttttccccaaatatcaacctcccaggacatacgaagattggcactgtaatcatctaaataatctttacttgtaaactgggcacttaaggaaccattcagtgagtttttagactgataagttctgctagctcctgcatcaaaatcaagtgttggaagcaatgctaattttgcctgtttgtaatttaaatccagctgttccatgcttttcattgcgataagcacctcgttatttttaacgagggctttttcaattaaatcaaccagcaatggatctttgtaataacttttccacggaagtaaaaccgtatcacccgttacagcaatttcttcacggtatttatcaggtgaatttaatgccgctcgggaatatttttttcctaccacacatgacgttaaaatcaagccggtaaagaaagtaattcctattttatatagtattttcattattattcttttatagattgaactacgattttcttgcccgaaactttttcctgtaaatattgaaatacaatgaatagcaacggaatcacaaaaactcccaaaataactccgctcaacatcccgattgaagcgctcacacttattgatttgtttcctactgctgttcctccagaagcaaacatcaacggaatcataccaacaataaaggcaagcgaagtcatgataattggtcgcagtcttgatcttgcgccttcaattgccgcttcaacaatacttaaacctgaaagacgtctttgaagtgcaaactctacaattaaaatggcatttttggcgagaagtcccactagcataataagtccgacctgaacgtaaatgttgttatctaaaccaacagcttttactccggcaaaagcgcctaaaattcctgctggaattgaaagtaaaaccgccaacggcagtaaataactttcatactgtgctgccaataaaaagaatacaaacaacagacataatccgaaaatggcaatcgtttggtttcctcctgctttctcttctaaacttaaacctgtccattcgtaactgtaatcggctggaagtttatctaaaaccttttctaaattcaccataatctgaccattactgtaacccggcaatgccattgcggtaatatttaccgaattgtaaaggttgtaacggtctaccgattccggtccgtacactttatggaattttacgattgatttaacaggaaccatctgcatttgtgcatttctaacgaaaatttcgttaaacgcatcctcatccattctgaatattccatcggcttttacattaactctgtaaaacttaccaaatcgggtaaaatctgatgattgatctccggcaaaatacgtctggatatttcctagcagttcttttatgttcactcccatttgacgtgctttatcttcatcaacttccaattccagctgcggataatcggctctaaaagtcgtatacgcatattgaactccgggttgctgcataatttgtgcgatcactttatctgacattgcttttaaaacttccggacttcttgccattctgtcctgcaatacaatttcggcaccacttgttacaccaaatccttctacaggcggcattctgaacaccataaccgaaccttctttgattgtggataatttggccgtaacactgttcaaaatttcatcaatatctttaacttcacctctttcttttttaggctttaatttaataaaacctaatccgtatgcggtactggaactgttactcaaaatattaaatcctgtaatactggtgttaacatcaatcgctttttctgattctaatattttctccattctctgaactacttcagttgtacgatcaagcgctgttcccggtggcatagataaactgtacaccataaacccatcatcttcaagcggaacgaaactttttggcgttgacatcatcatataaactgcaagagctgttataccggtaattaatcctgctgcaatccattttcttcccacaaggaaacgaacacctttgatatatcttccggtaaaattgttgaaacccgtattgaaccccacaaaaaaacggtctttaaaactggttttatgttcgtgatttccgtgtttgtcgtcatgattttttaatagaagcgcacataaagcaggagtcagtgtcaaggcatttacagccgagataataatcgcaattgccaaagtataagcaaattgtttatagaaaatccctgaagatcctgtcataaaaccaattggaataaatacagccgacatgaccaaagtaattgaaactactgctccggtaatttctgccattgcactatgagtcgcttctttggctgaaatcccagcatcttcttccattttactgtgaacagcttcgactacaacaatagcatcatcaactacaattccgatcgctaaaaccaaggcaaaaagtgttagaatgttgatggtaaatccaaaaaccaatagaaagaaaaaggttcctacaatcgctactggtactgcaatagctggaataatcgtcgagcgaatgtcctgcaggaatataaatacaacaataaataccagaataaaagcttctaacaaagtcgattttacctgtcctgtcgcttcgtccaaacgttctttggtactcattacgttcacgtatttaattccgggaggaaaagactttgataatcgctctacttctttattaatcccgatttcgatatcgtttgcattagaacccgaagtctgtaaaattgccattgtaaccgcatttttactgttcgatttgttgtccccgctataagagattgaaccaaattctactcttgctacatctttaagacgcaacaaattattaccgtcatttttaaccacaatattttcatattgttccggcttgtttttctttcctttatatcgaattacatattctaaagccgcttttgattcttctccaagtttccctggagccgattctaaactttgatctgcaatggcttgcgtaacatcagatggaaccaaacctgcatttgccatttttcttgggtcaagccaaattctcatcgaataatccttctgaccaaaaatctgaacctgacctacaccgggaacacgtttcatttgcggaaccaagttgatattagcataattctgaagaaaaagctcgtcgtactttttgttatcctctgtatacaagttgaaaataacaatcatactattttgctgtttcgacgttgtaagtcccattctgattacttcttgcggaagttttggagtcgcttgctgtactctgttctgaacgtttaccgcagcctgatccggatctacgccttgtttaaaaataacgctgatcgaaaaagatccatcattactggcagaagatttaatatactgcatattctcaacaccattaatctgttcttctaacggagttactacggaacgaattactgtttcactatttcctcccggatacgaaccactaaccattaccgttggcggcgaaatatcaggaaatctggtaaccgataatcttgttagaccaataatacccaagatcaccagaacaatggaaattactgtcgccaatactggcctgtctattattttttttaacatggaaaatgttatttatattaaaaactaaaaattatttttactaacagctttgacgatagtagcatttagcgttacttgattatcgctcttacttcgataccatcacttagcgcatcgatagaatttaatgcaatcttatctccgctttttacaccgttttttacaaaataatttacaccggaacttccggcaacttcgattggtgtcatggctactttatttcctttgcctaaaacaaaaacaaaaaacttatcctgaatatcttttacacttgccattggtaccgttaccacagaagacaaattgctgtttaaaataattctcgctgatcctcctgcacgcaaaagttttttaggatttggaaaaatcgcttttaaggcaattgttccggtagttctgtcaatgtttccgctggcgatttctaatgttcctttttgatcgtaagcactatcatcggccataataagacttactgttttctttgattttgaatctttggagaaagtcagataatccgattcgctcatcgagaaataaacaaacactgtattaatgtctgataaaatagtcaacggaactgtatctgatggtgtaaccaagtttccgacacgatttggaatacggctgatataaccgcttaccggagcttttatcaaagagaaatcagcgtttaattgtgaagatcctaaagctgcttttgcttgtgctgtctgtgcttgtgctgcatcgtaatttgcctgtgctgtttttaactgcatgtccgaatatacttttgcatctaccagaggtttcactttttcaatttcaagtttagcattcgctaaatttgccaaagcacttttgtatgctgcacgactgctgttaacctgctctgtgtaaacatctcctttaattttaaaaagtgattgtcctttgtttacatagtcaccttcttttacataaattgcttcaagatatcctgaaacctgcgctttaatatcaacatttacggtaccttctaccgttccggggtactttttctctacttcacctgtaacagattttgcctgaaaaaaatctacttccggttttggaaccgccattgcatctgcttctgatccgcttttaccgcatgaagaaaaaccaatgataatcaataagactacaacggtattgagtgttttataattttgaaaaaattgttttgtcattttatttcactttaatgaatacatagaatttgaccgcaaaataacagcacaaaacgacctttaaacagaagaaagttacccaaacggaatttttcgataccgaaacgaatacgtatctgaccaaagaaaatcaggccttttaaaaatggaattttaaaaaaatatctgcagcaattattcggctgtcatgtatatcgtaatcgatttttttttgccacgtaaaagcgtagttccggcgactataaagtttttctgatgtgtatgagataactgttcataaaaagaatgtgtaattaaaagatcgacattaaaactattgcacaaatcccgcactcttgctgctgtacttaatacatcgccatgatacgcaatttcggttttaatctgtccaatttctgctacggtaacaagaccttcatttaccgaagctttaaattttggctttaagccgaatttcttttgatagaactcctttctttctaacaatctaatagaaaatttctcgtaaagttcaatacattgttgcctgtcaaaaccttctgaaactttccaggtaagaaccgcttcgtcgcctacatattgatatacttcggcattgtattttggaagcaattctgataaatcactaaaacattcctgaagcaaaaggctgtaattataatgtccggcttcttcggctgcagacgttgaggaatacatatccagaaacataaatattcggtattctacaaccggaatcatatagtttcctctaagaagactttcgaagtaatttttccccattcggcggcggaatacctgaaataaagtgataaaaacatagacgataagacagtaaaatgtaaaactcaaaatccacatattgctaagctgcaaaacaaataaattgtcaattgttatataatgcgctttattaagtcccgcaattataataagtccaattatacatgttagtagaaaaagaaggcttcgaagcagaatcgttactaatattccgaagtttttaaaaaaccttggatacacatattcctgtagcaaaaacaggtttgtaccaataaaaacacccacaaaaaaagcaatgatgagctctgattttaaaaaatctactgcacttgatccaatctcccgaaaataaaaatcgccgatcatactacaggtcataaagacatagaaaaacagcgccataatccataatataataatctgcaggtattctttgaactttaaaaaggtttttagggaatatttcatttaagacaattttgatacaaaccggactaaaaaaaataaagtctagaataataataatgcagcaaaattataccaacaatacaatgggaatttaaaaagtgttacccaaacgttaattacaattactcaatagtgatttatcacatcctcaaatgaccctaaaatattcattttagcgatccatccattgtttaaatacaggcgctttttctctgcttatgatcacttcacgttcagcatctaatttaagctgtatttttagctttgcattaaaatagtttgagatcgactttatgctttctactcgaatgaaaaactgtctgttggcacgaaaaaaaacatccggatcaagttcctgctctaattcttccatagtctgagttacgggaatggccgtgccgtctttaagcactaaattactggtcttaaattccgaatatataaaatcgatatcagcaacatctacacttttataaccgtcgcgataggttactaaaaaacgtaatctaaaagaaggtttattcataaaaccttttagaattccggcaatatctgtggtgttattttcaactttcgaaatagatttaaacttttttaaagcaaattcaagttcgtttttttcaattggcttcatcaggtaatcaatactgtttaccttaaaagcttttatggcatattcgtcataagctgttgtaaagataactggagaggtaatttcgacttcatcaaaaatagaaaaactcaatccgtctgccagacgaatatccatcgtgattaaatccggcgccgggtttgaattcagccatttaactgaatctgcaacggtatcaataacggccagaatctcacattgaggttccagttcttccaacagtctttttaggtggctggcgttgatactttcatcttctacaattaaaattttcatactattttgaaattaaaggcaaacgtacacaataagccccatttgactccgagaaaacgggcattctatcgtgcagaattttatatcgaaactcaatatttttatgtccgattccagtagaaaccaaactctttccggctgttggttgtagattatttctaaccacaagatcaccaagatcagaataaatagaaatcgtaagcggatttgacactgttgccatattatgttttacggcattttcgaccaacaactgcaaagttaatggcggtaaatgacggtctaaacaggtcatatcaatttgaagtttcaaatcaaccttttcaccaagtcttttctttaaaagataaaaataagcattcaaaaattcaatctcttcttttactgttatggtatctttatttaggtttgaaatcatataacgatacacctttgtaatattctccaaaaatgatgcggcggcttttggatcttcatgaattagctccgtcagggcactgaaattattaaagataaaatgcggatcaagctgtaattttaatgactccaattcatattttgctgcggcttcctgaagttcagatgcttttacttttagttctgccgcttcttcagaagtaacacgccaacggttcaacaaaaatatactggtatgaataaaacttataaaaagggataatatcgcagccattaaattggactgccagatctgcacaagttcgctttcttttagcggtgtccacgaatataaatattcccacaaatacgaaaaaaaatagtttaaaagaatattgcctaaaataatgcatataaattgtgcaaaagctctaaatattggcttttgttcccaactaatccaataatttaggcttctcccaacaaagagactcaactctgtaagtacagcacaatatatcagaattataaatatatcaagcgtccaatctataaccaataaagtgttgtgctcaaaatcctgatagggattcagaaaataataagaggataaataaatcaggaaaaccaccggtataacaataactctataatatttatagaaaaaattctttaccatgtaatagtagtattgtcaagataaacaagaaagtactatactagtacttctggcaatgaatactactatttgcattagtttataaaaaacttccgtttattttcaagaagagacacatttatttttaaacagtatttttagtgtttttagaatatattataaaaggaacttcccaccatcaaattcgtttttaaagtgtagaaaacattatttctctcgataatcaggttcgatttacagatgataaacggtgtcctatttaaaacattccatctctatcattatttatggtttctaaatcatctgtgtgatattcttttttgatactatcgaacagttgcaaatagttgtgccttgctttctcccatgaataatcttcttccatacaccttagcattattttttgccagatatcattttggaatttataggtatgaactgtttttctaagtgcttcaataaggcttttgaaattaaattcatcaatataaaacccagtacttatttcggggtattcgttatgcgatattacggtatcacgcaatcctcctactggtctgacaacaggaacagtaccaaacgacattccgtacaagtgaaccaaaccacaaggctcaaataaagaggggcataatatagcgtcagagccagctaaaaacagatgtgcatccggttcattataagttggtatataacaaaatttatgaggaaactttttttgagcaagtgcaaaccgtttattaatattaccattaagccctccacccggtcttccacacacaattagttttattcccgtattcaagagggcttcaaatttttcgagtgaagtttcttctgtgtcccatgagttaattataatacctattcctttctgatccgttaaacgtgacatcaataaaatcaccgggtctgaagaatcaacaaaaccggcacgcttaagaagaatttcctttgcctttgctttcatgatgttaaccgaagatttattataagtacccggaatataagggcttttttctggggaccaaattgtttgatctataccatttggcagagcaaaaatctttttcttttttattgactttaagtatgcgagtcctttgtgaggaaggtttcctgttaagagttcttttccataatttttgctgacagtcccaacataatccgcattttttaacccaattgaaagtaatgaagctgttttatactccctaaatatttcttttatttcagcactttcttcttcgtttaaaaattcaagtgtatccgggaaaatatcgccctgatattcataattatgaattattagaattgttgaatacctttttcttgaatatatttcattcattaatttagaaaacgcaaaacaaccgcatgcatgccagtcatgaaatagaagaaaatcaggaagtagctttaaattataaatcaattgtaaagctgcttttgcaaaatacaaataaacaatataggatgatttattatcataaggcctgtcgccactttctcctaataaatcactttctgatgattccagatcactaaaaattaattcatcggacatattaaggaaataatagtcaacattgtcctgatttaaataatagtagtcaaattcatattcgatattttgaatttcaatcttaaacgattccttaaaatcaatattctctatcatcattcgcttttcgtaataaaaagagattaccacattatgtgtactttccgataaatattttggcagggccccgacaacgtccccaagccctccgcgtttgtaaaaaggtgcaacttcagaagtaaaatgaattatcatttaataaaagtattagtttgtttattaagaaaagggactgcgttccagagtttacaataactcgaatgttccattttcttcatttataaaaaatatttccgccgaatatcttttgatttttgctaccattgaagcatccgcctccttgttagcgctatatgtaattggatgtaaatactgatggtcgatgtcatcaaaattgaatacaagaaatatagaatccttggcgtaagatctttgaatgatcattactttatttttattatctaccaaaggaaaagcgatgctgccaaaattaaatatattttcatatgccgcttttattctgttcaatttttttattgtctcatgaacaaaatcgcttgtttcaccagactcaaattccatacattgtcgattgtccgggtcggcaagaccattcatacaattttcttcaccgtaatatattattggtgtaccaaaaatgccataaataagtgtaaaagcaagtgaatattttcgtttatcttttattattgaataaaatctcgctatgtcatgattgcttaaaaaattccaggaggattgattcacgctgaacgaatttctactctgaactttcataatggacagcactaaattagatatcgagacactttcatactgaaaaaacggaataaggctatccaggtataaggaaaagttagttattccgtccaaacctgaatctacaacaaagtctgataaactattgtcccataactccccaataatcattagatcaggcttcacttttctactggaagttacaaattcttttatgaaagaaacaggcatctccgaagctacatctaatcgccaaccatcaatattaaatttttggggccaatatctcgctacattcataaaatattgctgtacttctttttcatcgaaattaaactgaggcatatctttgtacccatgccacgaactataataatgcctggtttcatcaaaaagaggaaactgttcaatttcaaaccaatttaaataggccgattttgcctggttttctaaaatatctttaaaagcgaaaaaatctgtactacaatgattaagggatatatcgagtatcactttaagacctaaacgatgcgccttttctatcaattcattaaagtctgcttcgtctcccagaaccggatcaatcctctcatagtcgatacagtcgtaacggtgatagctcttggaaaaaaaaattgggttcagaaaaatgaaatcaaaccctaatccggcaatgtaatcaagttttgaaataataccctttatgtttcctccaaacagactagaataggtaggttctcctccccattcaaccaagttcaaactattcttttcttccggtatacgatgaaaacgatcaggaaaaacctgataccctactctaaatggcaaataatcattccttttttcaagcggggttgtaaaaaggaattctgtgattggactatcacatattttatgattgtcatgaagatattttgtttgattagatccgttaaattttatacagaaattaatttcactttttacaaatttaagtctggcaaaccaaaatgttacatttttttccgtgtaagcgatcgaaaacggatactcctccgtgccttctactaaagctacatgacttatccatttttgatgtgttattagtcgaacctcccaaatatcatctttaatatgacttatgcaatgtggcttatttgaaaattgaatcggacagaaaatttctgtttccagtacaaatgatgctttcttttgataatcgtatttagatatgacaaactgttcatcattttttggtgaatcaaatttgttattaaaaaaaaaatgataaaagaattttcctttaggaagatctattcctattttaaaaatccctccgcctttatatttcattttttttctgaagtaccttccgtgagaaggatatactccaatatgaaccgtctttacagactcatccgataatttgaatataatttctttccaaattgaatttttagctttcttatttgttacttcattatatatttgattcataacttactcttcactttctttgtttaaaattatattctatccttttttgatatggaaagccccctattaaaattacttttcatttaaatggtgcggaatcctattcacccatttatgtagattttcactttgaaataaagtattgtgctcgccaggaattatttctatatccaaatctccattaaaaatatttcgctgcgaatttccttctttgacttcggccgcgatatcatcaacagacaatattattgtatttttaacagctaacgaaggccaattataattgatatttgcaaagaaagattttaaaactaaatcattgtaaaatttattctgaaaagccctcttcaactcatcggattccaccttaaactgaaaaagattaattttttctaagtagttgttacaaatatcccaaatggttgtttcgtcatcagtagctttttccagattgctaaataattcatccgcattcatcaatgtagaactccacgccaaatctttttcgataaaccacacaatttcttcctttgtgtaatttgatttaatctcttctctagaaatactttctacccatagtggaggatcaatcagaatcaattttttcacctctttgtttttacttattaacttactagctatttcagctgctaataaacaaccgctacaaaatcctcctaaagaaaatgggccttcattgtcaatcattaatagttcttcaacagcttcttccgctatttcagataatcttgagggatcataaataatattgtctactattatttctttgttactttctaaaaactcatttatctcgggtttaatagccggcgcttgtatactgtaaaatgtcaaatattcctctaaagaaactgacatatccataatccctattatacttgtagatggcaatattccgcctaatggagcacaaaaaaagaatttctgtaatttttcatttttactagtagcggcaattttaacatgtttagatttttttaaggctttatattccggttcaaaataatttgcccaaccattgagtttatgaattttatctgaaaaatctcttattgtaaacaaatcaaatattattgatgttgagattgacactcccatttttttattaatttggtttgtcatttgtattgcacttaatgaatgtccgcccaactcaaagaagttatcatcaataccaacaagttcaattcccagcacctcctgccatatatctgccagcgtcttctctaccggattacgaggctcagaataccctttatcaaaaaccgatttatccacattaggaagtcgaagcaggtctatcttaccgttgaccgtcagcgggatcgattccagttcgacccacagctggggaaccatgtatactggtaaacactcctgaagatagctaacaagcgcttctctggtataacccgaaacgggaataacgtaaccaatcaactgtttgttccccgaagcatctggctttgccaaaacaatactctggacacataaaccactctgcagtacttgactctctatttctccaagttctatcctatgtcctctgatttttacctgattgtcttttcggcctatgaattctatatttccatttgtcagccatttgcctaaatctcctgttttgtaaatacgttcgccttctttaaacggatttgcaatgaacttctctttggtcagctcttcctggttcaggtacccccttgctaacccatctcctcctacgtagatttcacccataactccaataggtacaagttgcatttccgaatccatgatatacgtctgggagtttgcaataggcttgccaatcggaatattctcgttgtattctttattttctactttataacaagttgagaatgtcgtattttctgtaggcccataaccgtttactatttcaagttctgggtaggctttttttacttcattgacatggatagctgacattttatccccccctgacaccagatacctcagggaactaaaaaatgacagatccgtttcgacaatctgattgaaccagggagctgtgagccatagaacattgatctcttcttgttgcataacttctttgaatgctgcaacattcatgagtgtgttttgtgacagcagatgtaactggcctccaaacagaagcatgctccatatctcaaaggtagtagcgtcgaatgacaatgctccggtaagaacaagcctgtcattggaagcaggggtaaaaaagttcgtattataaaccaatcggacgatacttctgtgctctaccatcactcctttgggtttcccagttgagcctgaagtatacatcacataagcaagatcagatgggctacattttttcgaaagttctccagaatgataattctcttcatcaaattctatatcaatggcaaaaacttttccgtcataataatcgatgtcgtaaatgaaattggcttctgttatcagcaaatttaaagaactgttttttacaatatattcctttctggaagatggatattcaggatcgatcggaacataagcgccccctgcctttaatactcccagtatcgatataattacccactcacttctgtccaactgtattcctatcagagtatcaggttgaatattgtaattatctctaaggtaatgagccagctgattggacttttcgttaagctgttgataagtcagcctttttttaccaaaaactaatgcaatattatctggtgtcctttccacctgttcttcaaaaaggtctactattgtcttctcttttgaataagctgccgctgtattgttgaacaatactaactgtctattcttttctacttcagacagataatctatttgggaaattttcttgtcaggggtttcaagcaaggcgtttaacagttgcttgtaatgctttatcaatacttcaaccatgcccttatcatagacatccggattgaatgttccccaaacttgaatatagtcatctacttctttaaaccctatttcaagatcaaatcttgacgtaagatttccaatttggatcatttgataagactgattatcagccggtgtcgaatcactttccctgtcagaactgttaaataccagcattatatcaaagagtgtatttctggaaatatcttttggtaagtttaattccatcactaacctattgaatggatatgattgatgagaataagcatctagcatattttgtctgacctttttaagtactgaaccaaagctttcttcaggacttagcttatttcttatgacaagcgtattcacataaaatccgatctgatcaattgtgtctgcatgatctctcccatttagtggagttcctatgatgatatcttcctgagaagtgtaccgatacattaacacattccatgcggcgatcaaccccataaagagacttccaccatttttttcagaatatttttttaacttggcaatagtttgcgctcctatgaaagaacctttataagcttctcctttataagtcaacacttttggccgcggtttatcccttggtaaatctaatcttggtaattctccctttaaattatctaaccagtattttctatgagaatttgcagactcattttcgagcatattcaattgccaggcagcataatctttgtactggaattttagcggagccaaatctggagtctgacctgcctgataaaaatcgtaaaatttccttagatctctcataaatacatccattgaccagccgtctgtattaatgtgatgcaaattataataaagaacatagtcttcttcttctaatctgattaaactaaccttaaataatggtccattttctaaatcaggttcctcctgactaatttttcctaaataagattccatcaattcaaccttgttttcttcacttctgaaatcctgataatctatcttaaaccctgaattctctacactcaaaatccattgtcttaactctccggaatcatcttttttataaacagttcgtaaactttcatgtcgttcaagcatagaccacaagctttttttaacagcctctacatttactttagaatcaaggtaaacatccccaataacctgataagctgctgcccctccttcaaattgacttaagatccaaagtcttctttgcccatctgaaagcgcataactttcttgagaagggagtttttctatcttgacaaaatccgattttatttctgacccttgtaatagtactaagatttcctctcgacgatatttaattttatcagagatttccggagtaagaatgccgggtttaatatccaactttattcgatcgtcggcaagataaagccttccacctaaattctttatttcaactaacaaatcataaacatcatccatttaaaaaaggtattattttttttataaaaatttaattttctacaattatataaatttaactttaaaactcaatggtttcaatactcgttgttttttcctccgagctcttgttaagccacattcgagtttcaattatcttggcatgttcatataattttgttctttcaaaaagttcctgaatggttaattgtacattaaaactcttattatattcagccacaagaccaattgctctcatactaaatcctcctaaatcaaaaaaatcatcattcattccaatatttttttgattcaataccatttcccaaatttcaataagcttctcttctgttttattttttggagccgcatattctacaacatttaccagacttacacctacgggatcaggtagggacttctttgctattttgccgttagctgtcaacggcattacttccatttgaacaaagtgcgccggaatcatataagaaggtaacctttcttttaaataggtttttaaagctattacgttctgctcaacatttaacgtaatataagcaaccagctctttttctccagactcgttctctctggctaagactactgcctgacttacagcttcatgttttactaaaacatgctctatctctccaagctctatcctataccctctgagcttgacctggtcgtcttttcggcctatgaactcgatgttgccatcgggcagccaacgacctaaatcacctgttttgtacaaacgctctcctgattcaaatggattcgctataaatttctctttcgttaactctttttgattcaaatagcctctgcctaaaccagttccagctatgcatatttctcctgttacccctgttggtaccatcttattgctgttatccaatatatatatgtgggtattacctatgggtttcccaatatgtactctcctggtttcttttcctatactggctactgttgaccataccgtgttttccgtcggaccgtattcattaaataaaacacattccggcaatccgataaaatgctcttctactaaactgccacttaatgtctcacccgctaaaatcaccctcttaaaaggtaactttcctgatgctgaatgtgacaacagcagctgataatacgagggtacacacaatatacatgctattgcatactcacttataaaactactgatactaaaaatatccttcaggtggttatccactacaatgtataatgtgctaccgccggtaagacaaccccataaagccgctacagacgaatcaaaagaaaaagaaggtatcaataaatacgattctacaaaatcataatatgcatttcttgtacacgtagaagaatataaatttccgtgagcaatcatgactcctttcggatttcctgtcgaacctgaggtatagatcacataagccaaatgatcgcttttagccgtgcgagtctctaagtctttagcataacgctcctgattttctttgaacctgcttaactcttgctcatccagacaaaccttgcactgagtatcttcttttatatagtctattctttcctgagggtattgcggatcaataggaacataagctcctcctgattttaacacacccagtatcgacacaatcatccactcgcttcgctccaattgtatccctatcagatcatccggctgaatgttgtaattttctattaggtaatgcgccaactgattggatcgctcattaagctccctgtaagtcagttctgtatcctcaaagactatggcgatgttatccggtgtctttgccacctgctcttcaattaaatctacaattgtcttgtccttcggataagctgctgttgtatcattgaaggtaaacagcagtttgtgtttctcttcttccgatacataatctatttgtgctattttctcttcaggggtttccaacaacgcatttaacaactgtttgtaatgccctatcagtccttcaaccatctccttctcgtacacatccgagttgaatataaaattcaaggacaggcaatcgcccacctcctgaaaagtaatctctatatcaaattttgctgtgctataaccctgatcaactacctgatttaacgcttcttctgatatttcaaatcctgcaattctttcgtcattattctcaacagtaagcatgacatcaaataccgcacttctgcttgtatctctttgaattatactgccgaactattggtttgtttattttactagccgttgaatttgttttgataaaatgaccaagaataattatattttttttacaattttctaaactaccgctgtctattttatgaatttattttgtcttaaaaattcattctcaattgcttcaaataattccgaagtaccagcaaataaatcattaatatcaatttgttccaattgagttttacatttttcccaatcaccatgaacgaaattatttctaatatttctaatgtggctgtttagatattcgagtgactgcggtatattaatattaaaattacaaaatttattcagatacaatagatatgactcaattatacttttccccttttcttgttttaaattcaaagaatatcctccgtaacaggttgaagtattttcaggggcgtatgttgagcaaagtgattttaaagatttttcaacataaatatttacgagaattatttgattcaagggcaccgtaaaatagagtaatttagtccatgttggtatttcgaattcttcaagaccacaaatagcatcttcattctgaaactccaatccatcgtaagaactgtatatattaggatcttcttctaaatctttcttttcagtttctaatgccgaaattttatgagttatactatcctgaatattcagacaaaaattgaataattcttgaccttcttcttctattacacagtactcgataatatttgagctactacgaaaaagcatctcttcagtaatagatttaagatttttaaaacctgacatatattaattgaagttatattaggttagttgttgtatgaattttatattttttttcagatttagttgattactaaaaataaaaagatgtctaagtatcttttttataattcttcaaaattgaatagtgattggatattgacatttaattctttggcaataccgaataatgtttcaatttttggattagtttgacctctttcaatttttcctatatgattttttgcaagtccagttcttaaccctaattcctcttgtgaaattggcttaccagtttctttattaatacactgatttctcagatgcattatccttttccctaattgtattctttcctttttaaagccattttcttccatattataaaaatcgcttttaaaagaaataaaataggcaatctatagattgcttttttgagaaaaagtattatatttgattttaataattaaatttgcgatacttcaattaaaatatttgaagcattcgctttgaatctcgtcctcaaaactggtaattttaacacgcgagatgataagtaagatgctcacgccttaaagggggtgggctcacttattcgcgtgtgggtataccagtaccttgagggcaataagctgagttccgcgcctctttttttggctctattttcagatttttctcagcttttattcttagcgcacttcactatttcatagtctcgtaattagctattgtctaaccaataaacctgcgtgcctatgaattaaaaaaagataaaagccctatttaatgcctgtgctgttataatttttcattttgagttagtcaatgtacagttgcaggcaattaagattggcaaagtaagttatggtttccaaatgcttccaaatggaaatcacacaaaaaaatggccctctatctcatgtcgtcaaactagcatagaggaccagaattaataaaactaacgcttcattaaactaacccaatattatgaaaactttttcattaaataaagggttggcgggactttggtatccgtttattttcgggttttaccttttttgtacgccagccttagcaaggaataccttgcaaattgctgtttcacaacagcagaccataacaggaaccattactgatggtattacgcctctggtaggtgttactataaaattaaaagggactacaaccacggtagtttctgatttcgatggtaaatattccattgccgcacaaacaactgatatcctgatcttttcctatctgggctacaaaacaatcgaaattaccattgctaaccgcaagattatcgatgttaaaatgcacgatgatactacctcgcttcaagaagtcaccgttaatgccggctattataaagtaaaagacaaggaacgcaccggaagcatctcaaaaatcagttcaaaagatatcgaaaaacaacctgtaaccaatatgcttgccgccatgcagggacgaatggcaggtgttagtattactcaaaatacaggggtagccggaggtgatttcaatatacagatcagaggacaaaacagcctgcgttctgatgggaacagaccgctatacattatcgatggcgttccttattcctcagatgccgtaggttctgatctgaccggaatagtcctccccggtccaacgagtccgttaaacagcattaatccagcagatatagaaagtattgaagtgcttaaagatgccgatgcaactgctatatatggttcaaggggagcaaatggcgtggtacttatcaccactaaaaaaggcaaagaaggcaagacaaaatttactgccaatgtatcgggtggatttggctcggtgacacgcctgatggaacttatgaatacccaacaatacctacaaatgcgcagggaagcttttatcaatgatggtatcccttacggccctacggattatgacgtgaatggaacatgggatcaaaaccgctatacggattggcaagaagtactcattggaggaaccgcagagatgagtaatgtgcaggcatcgatatcaggaggttcctcagggacgcaattccttatcaacggcaatttccataaggaaacaactgttttccccggtaactacaattacagaaaaggcaacctgcatgcaaatctgaaccatgaatctgaaaacaaaaaattccatatcaacttttctatgggctacacagctcagaaaaataaacagcccggcattgatattacccaacaagcgattcttctaccccccaatgctcctgcattgtatgatgtgcaaggcaatctaaactgggaaaatagcacttggaataatcccatgagcaatctcgaagggaaatatatctcaaaatccaacgacctttttgccaatagcttgctatcgtacaatatcctgccgaatctgatcgctaagacaagttttggatttaccgatacccgttttgatgacagtcgaacacagccctccactatgtatgatcctgcttatggattgggcagtgaatactcctccctctatgtcaataataccactcgaaaatcatggattatcgaaccccaaatctcatggtctaaaaaattgggtaaaggaaaaaccgaagtcctcattgggagtacgttccagcagcaaacagctaaccaattggtacaggaagccagtggatttagtagcaacagcctaatctataatctttcttccgcctttaatgtatttgacttggtacataatgaatctgtctataaatatcaggcttttttcggaagggttaatttttcctggaatgagcggtacatcctaaattttacaggacgcagggatggttcgagtagatttggtccgggaaggcagtttgcctccttcggggcgattggaagtgcatggttgttttcaaatgaaacattcgtaaaagaaaaccttagtttcttaagttttggaaaattaagagccagttatggtaccaccggtaatgaccagattggcgactatcaatttttggacacttatggttcatcaggaaacaactatggtggcattaatggtctggaaccaactcgcttgttcaatcccaattttggctgggagaccaataaaaaactcgaactggcattggaagcaggttttttaaaagaccgtatttttataaccgcaggctggtataacaaccgctcttcaaaccaattggtcggtattccccttcctgctaccacaggattcaattcgatacaggcaaatttagatgccaccgttcaaaatagaggaatcgagcttacccttagaaccgtaaatttccagaaagagtcctttaactggacaagcagttttaatgtgacaattgcccgcaataaactgttgtcttttcctgatctgaaaggctccacttatgagaatcagtatgtaataggccagcctttaaacattaagaaattataccactatacaggaatagatcccatgacaggaatctaccagtttgaggatttcaacaaagacggtttaattacatcaccacaggataagcaggctatccgtgatttgaatccaaaatatttcggcgggtttcaaaataccattacctataaaaactggcagttggattttctttttcagtttgtcaatcagctcaactataacggatcatataccactggactacccggcgctatggccaatcagcctgtaggggtcatgagtcactggcaaaatcccggagataacgcgacctatcagcagtacaccacaggggtaaatagtgaagctatggatgcattttacaagttttacgccagtgatgccatgataacggatgcttcgtacgtcagactcaagaatttgtcattgtcttataccatccccgaacagtggctcaaaggagtaaaatgccgattggtgtttcagggacagaaccttttcaccatcacttcctataagggggctgaccccgaatccagattcacgacaagcctacctccattaagggtatttacaaccgggcttcagcttactttttaacttcttaatttaaacattatgaaaaagaaatcatttgtacaatttatccaaaactataaaatcacaatagtaaaccgcagactactgataggattagctgtgtttggcatggtgcttctaaatgcctgtgataactttgttgccgtggatcttccgtcctcacaactaacggcagtggacgtttttaaggacagggctactgccaatgccgcaatggtaagcatttatgccaaaatgcgcgacaatggcattttaagcgggagtgctactggaatttccaatcaaatgggaaactatgccgatgagcttgtgtattacggtgacatttccggtacgacccgaaacttttacaataacacattacttgcttccaattcagagatctttaactggtggagcagcagctacaatcagatttatgccgctaatgccattattgaaggggtgaatgcttccacggcacttactgctgtggataaaaaccagcttaccggagaggcgttgtttgtacgatcgctactgcatttttatcttgtcaatctctatggggacgttccttatatcacctctacagactatcagcaaaataaagtggcacacaaaatgccctctgccgagctgtattcccatatcataaataatctggaacttgccgtttcattattgccggaagattatatttccagtgaccgcatacgtcccaataaatccgtggcgatggctttattggcaagggtatatctttacagaggcatgtgggcagaagcggcaaatgcggcttcttataccctaaacaataccggggtatacgcttgggaaacgaatctggacgctatattcttaaaagaaagcactacaacgatttggcagtttatgcccaaaaccagtggacagaacactcaggaaggagaaacattcatctttaccgcgccaccaccatcacttgttgctttaagtactgggcttatgagtgaatttgaaacgggagaccagcgaaaggatcattggactcatgccattacaaacggtacagatacttggtatcatgccaataagtacaagcagaaatcaaacactgcgaattctttggagtattccataatgtttcgtttggcagagcaatacctgattcgcagtgaagcccgtgctgagcaaggtgaccttataggggcaaaagaggatctggataaaatcagaaacacggccggcctagcacccacaacagcggtaagccagcaagatatactcagtgccatattacatgagagaagagtggagttttttacagaactgggacaccgttttttcgacctgaaaagaacgaatcatttggatgcaatactctcgccagtaaaagttggctggaatactacagatagattactgccactgcctgaatcggaactttcgctcaatccgaatctaaatcctcaaaatccgggctactaaaatgagacttaagaacataaaatataaccaaaaaactggtgctctaagaaatagagtgccggttttctatatggtgctcaccactttactgatctcattttttggttttgcgcaaaacaatcgcaaaaagcagcttgcggctgaccattatcacttatggaattatcttaaagccgagaaactctctgaaaatgcaaaatgggtgagtctttcactatattatgaaagtggcagcgataccttatttgttaaaaataatacaggaacaagaacctttagtttccccggagcaagtaaaggagaatttatcggtgacaattggttttgtatgatgagttcaaaggaagaattgaaaattgtcgacttgcttacatccaaacagagaattatacacggggtaatcaagtatgatttgaagacggataccaaagatataatcattttaaaacgggaagctgaagggaaaaaacagttggaactaaaaaatctagccactaaccaatctgtggttttaaatgatattgataattactggtacaatccaaagaccggtgccatagtatatactacaaagaccgggaatacaaggacaattgctatgatgaatctacgcgataagacaacaaatgtaatcgccagtagtatcaatacgggtgaatattccgatatcgtttggcaggaaaatggaaattccgttgcttttttaatgcagtccttggataaggagaaaaaaacagctcgtaccttagtaggttactacattacagccgaaggtaagttatatactttcaatccggcagagcaggataattttccggtagatatggaaattatctcctcctcttttgcaaatcttagtatttctgtggatggggaaagaatattctttggactagagaaaacgatgaatccaatcgataattcacaggtacaaatctggaacacacaggataaatttctttatactgccaaaatacaaattgatggatggaaaagatcagctaaagtagctgtatggtggcctgagctggatagatttaattgtattacagacaatgaatttccaaaaatgatgttaagcggggatcaaaaacaggctttcctttataatcctgagcactatgaaccccaggctaaccgtgacgcccctttggatatttatattttggatctgcaaacagggaagcgcaaattagtactgcaaaaccaattaggtaatgaagcttcaatctctgtttctatataccaaaagcaacttgtttattttaaagacaaacattggtgggtttatgatatacagagcgatctgcataggaatcttacaaaagaattgggagtatgtttttcagacgatgagtccgactggccggaggaagcaagtccttttggtaatccgggatggattcaagatgataaaacacttttcatttacgataaatatgacatctggagcattgccctagatggttcgagtgccattagactgaccaaggggcgcgaaaataaaacagcctatagaattgtttcccaatctaaagacgagtccaataaaatgaattatgacggcagttataaaggtgagtttgggtccaatggcaggttactgatcaaaaccgaagcactagagcatacgggatactgtttttgggataagaaaaaaggactgcagcccttattggacaagaaaatgcacaccagccagtttatagcctctgaaaagagtgaagctcacgtctatgttgaggaaaactttaatttaccacctagattactcataaaagagaatcgaaatgcaaaagaaaaagtattgtttcaaagcaacccgcagcattttaaatacaattggggaaactccaagctgattaactatactaattctaaaggtactattttaaatggtgttttattctatcctgcaaattatcatgccgatacaaaataccctatggtggtatatgtatacgagaaactgtccaaagaattgtataattatgtaagtccatcacagcataatccaacaggatttaatattgccaattttacttcaaaagaatacttcgtttttttgcctgatattgtgtatgaaattggaaatccggggccttcagcagtagactgtgttgtttcggctaccaaaaaagttgttgccatcgaatcctccattgacagcacccgaatagggcttaccggtcattcttatggcgggtatcaaacggattacatcatcacacaaaccactatgtttaaagccgcagtggcaggcgcagctattaccgactttgtgagcagttatctctgggcagcatggggttttgaaaagcccaatttttggcactatgaatatgggcaattgagaataggaaaatcgctctatgaggattatgcaggatacctgagaaactctcccatatatcatgcaaataaagtagaaactccattattgtcatgggcaggtgaacaggacggtgttgtgcattattatcagagtattgaattttatctggcgctccgacgccttggtaaaactagtacaatgctgctttttcccggagaaaatcatgtgctctcagatcgtacttaccagcaggatctcacccaaaggattgaacagtggtttgattattatttaaaaggggataaaaaaccgcaatggttttaagaaagaaatagtatttaatacaaaaaaacaatgcagttccaaacggaactgcattgtcatttctgcaaacaatgaaactacggtctaaaagtcggctgaacgcattggttagccgaatttttagcaaataattgtgctccgcttggtactaaacctacggtacaaacaattccattattgattgttgaacacatatctttttgctcacaagaagttccttgtgggttcaattttagatacccctgagttggcgccattgatttggcgcgcacattcatggcatgggttgtaaatgcacctgctatcgcaagagcaaatactgcaacaggtaaaacctgtttggctaaatttgttttcatgatttataaatttaaatgttagcgatctactctttcacaggttttcgatctttcccctgatacagcgctgtatattttcataaaggaattttagttttatcttgatacgagtttgtgagtttcctgcttagtttataatgaaccaaatacggccctataaatccataaaaattatcatttagaataaagaagttttttagcttttcatttttaatatggtagatgtaaaagctgccctgataggaattggtattaaggtcgtatatatcaattacactggcatccttccacatctgagcaggttcatattttcctaacaatgctgaattgacaaacaataattttttacaaacggcacttgttttattgacaatgacaggaggtgctgaaaatttcatttcctgctggcttgccacagtagtcactttaatttgggctttactgatagtgtctatggtcttgccacgatagtttaaattaagcgtactatctgctacgataaacccgttgcggtagagatagatgtaaaccagcttttgagtgtcttggtcataatgcaaggctccatcgacatcaaagattccatcaatttgtttctgtaacagatttgtattgaaacgtgttttgggctggctgccaaaatcaagagatcccagtatactttccccatttgtattgctgttggaacgaaatgccaatgtgagcgaatcgatgagctggtaatgggaaaaagttgtagacccgttccattttacctgagccttccaattgtttatatttcctttaaaaataacaggaacatatccgtcaataagataaaatttaggaggcaaaacccggacttggacagactggaataaaaaatcagtcctattgagatgaatcttatattcattttttttcagaagggctgtatccaatgttgtcactaataatggtgcagtatgactgcccagatatatcctgttttttgaagctccggcaaaataataagatttaaactttagatcgatttcattcacttttacagcatttccgggaaaacgacgaacaaaattattccggtggtggatgatgctttccgataacataaatagcagggcaacaatactgattctataatattgtaaagaatccggcactgtaatagtattgaaatataaaacgctgcctttttcaggcagcgttttgagaagaaaattacttttgaactataggagttctcagtgattctaaaacagcaactatatctgtataaagctctgtatttgaagcaacaccatttgcattggctgcagctccaacatatccttcaaattttgtataatccgcactgctggattttgttcccatacgaggattttttgcaggatcatgcgccgctgacatactcaaaccagaatatgtatttacagcatttgttcctcccgtattaaacgaaaagaaatcagtcagattatctgataatttagcaatattggtagactgggtagttcccgtttctgccaataaaggagcaaaatgtgcctgcagattccctgaagcattcgattggatatcagcaacaatcaatccgatagttgaatttaccactttgcggaaactcaaacgtccctgctcaatcatctggccggaattatcaggatcagaaaccattttagtcccgcctaagcgttcataaattgatgcctttacaggaggtgcaggggtttcgtcgtcattactgctgcaggaaatcatagctgcagatgcagcaagcaatacactaagtgtaagttttgaataaattttcataaatttaaggtattaaagggttaattaaaaaaacgatttattttttgagataatttataactcaagctattttgattcattgggcagacttctttgtttgctaaatttgcaggtagaatataacgcttagcatcatagtgtcttttagacatcaactcattgaaaactttctgtgagtttgtaattttattattgtggaaatacaccacaacatttcttttaacgataatagagtcagatgtcaggccttttatacttcttaaatcggcacatatttgtctggcctgcagagaatcgatatctgattgaaaatcgattctgcttacctgcagatttggcgtatcataaacaggtggttttactgttataatgtgaaaaagcaaaatggcaataaatagcccaaatattccgcttagtataaaaagtccctttttgattattttattaattttcataatttttatgtttttaaaattatctacgtctacttaatcgctgcggttttagaaatacttgcaaattgatcaatttagaatcgttttaaacacagaaattacctaataatttaattataaaggagatactagaaaactctggcaagattaaatccaaaaaatatatctccttttctccaatcgcctgttgttcttcccagatatccagcttcatcaattgcctgtgaactggtaaaatgcatttgaaaaacatgcccgccagtttctaaatcaaaacctatagatagtggatttttataaagagaattcggtgccctgtttaaatgcgctgcataatccatatttaaagaccagcgtttggcgaatttatatcttcctccaaaacctatggcatattgagtattgctttggtcaacgtcgtcaacaaaattctggtgaaagaatgacggtacaatttctaaagacagcttttcagaaaattttctggaaatcagcagctgtgctacataagtaagcctgtctttaaattcaagtttagggtacaagctttcttttaacgtgttattaatagacaaactattgaacccggctatagtgacgggaaaaccatcttttatttgaggcaatagcatatactttgttgcaaagtcatatgcaaattcacttctggccgcacttacattaagtccatttgtcaaaccgtaaataaatttaatttgtgtattggcattatccagtccgtagaaaccttcaaaaccatctttaatggatccgaatcggtgtgcaacaacaaaatacaaatcaccttttgcggccaattttgtagactcaagattaacgatttttaaggctttgaatgcagatgtcactttttcttttgtagaaggagtttctactccagagagcaaatcggtttgggagaagcttaacagcggaaataaaaaaaataatagagtaaagtttttcatgaagttagttttaaattgttatttgtattagtgtacaattgaagattggtctattttaaattcctggagcaattcgtcatatcctaaaaaacgccctttaatcttgagagttttcccggatgtaatattttgaggcaaacggtttttgaatgtcacaaatattttttcgctcataacaattccattaccggctttatcaatacttgttactggtgcagataattcaattgttttgtcctgatatttgatgtaagccagactatcgtttgaagcaaactctctttctagttcgttaacggttacaacataatcagcagtttctgattctatatccctatgccctttgtagatgtagaagaaagacaaaattccgattattataaaaagtgaaattgtagttagtattttttttctcataactgttttttagtatttggattatctacgttaaaaaatacctattggatttaaaccattaaatatgccttttgttaaatctgtattattcttttcaacgtatatgattttgaaatgcctgatgattcttaaaatcatgcctttatcaataactaaaaaccaatcttatgaatctaaaaacacttttcgttatctcatcattagcttcaatctttataagctgcgccaacgatgatccaagcaccttaatggaccccacacccattaatggtctggcaacgtacagccaaaatgtaaaatctattattgataataactgtgttgtatgccatgcagcagttcctaaaaatggagcgcctatgtccttagttacttatgatcaggtgaaaaatgcagttttaaatcgaggattgcttacacgaatttctttagaaaatggagatagttccttaatgccgcagggcggaccaagattacctcaaaccactatagatattataaataaatggaatcaggatggattattagaaaaataatctagaacaagatcatgaggaaaatcataataatgccaatgctattggcttcttttattgttttttcgcaagaaaaaatagtaactaaatctgcagcaataacccttgaagcttcagtaccttcttttcagccggttgcaggaactaacagcaatgtaacttttgttttaaatcccgcaacaggagaagtggcaagccttgctttaatgaaaggattccaatttgaaatggctttgatggaagaacattttaatgaaaattacatggaaaccgataattatccaaaagccgtttttagaggccaaattgaggggttcgacattaaaagtctaacagaagattatatcataaaagggaagttagaacttcacggtaaatctaaagatataaaagccgctgcaaaaattaccaagacggggtcgcgaatcaccatcatttctgatttcgccgtaaatgccagtgattttagcatccctatcccatcgcttattaagtataaactggacgatagggtaaaagttcaaattattgcggttttaaaataagtgctaaaccagataaatcttatccacttaaaacaatgtaaagccaaaaaactatgaaaaaaaacatactcattgcaatgctatatgtctgcgctattggcctctcacaagaaaaaatgatcagtaaatcaggaaaaattacttttgaagcatccgttgcttcttttgaagaagtcaaggccacaaatactaatgttacttttgtcctgaatcctgcaacgggcgaaattgcaagtttagccttaatgaaaggatttcgatttaaagtcgctttgatggaagaacatttcaatgaaaattatattgaaagtgaccgctatccaaaagcagtctttaaaggaaaaatagaaggatttgatcttcagagcctaacggtaaatcctaaagattttatcattaagggtaaattggaacttcacggaaaatctaaagatgtaagcaccacagcaaggataagcaaatcaatatcagggattagtattttatctgattttagtgtaaatgccagtgattttaatattgcaataccaagccttgttaaaagcaaagtttctaataaaataaacattcaagttgcagcagtattaggagcaaacagacaataactaccaaaaaaacttaaaaagtcaattattcattatatcaaaaaaaatggaggaagaaacaaaaattgaagacgactttacccttatacgctttcagaatgacagttcagagcctttttttaccaaccgtgagctgggaagtgatatgattcagtttcatttcggactgaaaggcaatagcaaatttttgttcagtcagggtagttatactttagaattgaaagaggaaaaatccctgcttttgtataatcctaaaaagcagacatcacttcatttagaacttgctccaaattcatgggtgatttctattatcgtctcgattaagaaatttcacgcgctgttttctgccgaagcagattatattactttattaagtcctgataataacaaccaaaagtattctactgaagcaaatatcagtcccccgatggcaattgttttaagccagctgtttcattataactttcatccttctataaaaaacctttattacaaaggaaaaggatatgaactgctgagtttgtattttaacaggtctgagaatccaagtgcgcaacattgtccgtttttaattgatcaggacaatgttttgaaaatcagaaaagccaaagaaattattattgcaaatatgaatgaaccgcctggtttacaggaattggcagatgaaattggccttaatatgaaaaaactaaaaataggtttcaaacaaatatacggtgatactgtctatggttttctgtttgattacaaaatggatttcgcccgaaaactactcgacagcggctgctacaatgtaaatgaagtgggcttaaaaataggttacagcaccggaagccacttcattgcgggattcaagaaaaaatttgccacaactccaaaaaaatatctgatgtcgattaataccaattttaaaacagtatcgattttgtaaattgcagtataaataaaaaataatattactcatatttctaaatggcagcaaatgctacttttagaaaaaattcaaacaacaaatacttaaagcttaaagcttaagttaaaagcaaaaacataatgaaaggcgtattaatagtaaatttgggatctcccgaaagtccaacaccaaaagatgtaaagccgtatttagatgaatttttaatggataaatacgtgatcgatgttccgtatttattgagagctttattagtccgaggcatcatcttaagaaaaagacccaaagaatcggcacatgcttatgcaaaaatctggtgggacgaaggttcgccccttgtagtgctttcagaaagaatgcagaagaaagtacaaacattggtaaatgtaccggttacactggcaatgcgctatggaagcatgaccatcgagaaaggactccaggagttacacgataaaggcgttagcgaagtaatgcttttcccactgtatccgcaatatgcaatggcttctactctaaccattttagtaaaggcagaagaaattagaaagaagaaatttccacagatgacttttaccaatgttgctgctttttacaacaaaccggattatatcaaaaatctggcagattcaattcagaaacatttagctgcatttccatacgatcatttattgttttcgtatcacggaattccagaacgtcatatacgaaaaaccgacgtaaccaaatcgcattgtaaaattgacggttcttgctgtaacacaccttcaccagcgcatgatttctgttatcgtcatcaatgttatgaaacgacaaaacaagtagtaaaattattaggtctcacagaagataaatacagcttaactttccagtcccgattggctggagataaatggctggagccttataccgatattgaaattgataaaatgccggcaaaaggaattaaaaatctggctgtggtaacaccggctttcgtttcggattgtttagaaacgctcgaagaaatcgccatgcgtgccagagaagattttgagaaaaatggaggagaaaatttcttggccgttccttgtttgaatgacgacgaccagtggtgccagactgttggtaactggattaatgactgggctgaataatactaaaatagcaatatcgagatattggacctcccatcattcatatatccgttcgcctctttatataaatgaacttcgataattcttctgtcgaagaatttagtgattcggcagattgaataatcaaaagaaaatttctctcaactcattatttccaagatttacatcttcacacaacaattttgaaatacccaggatattggcaacggactttctcaccttgtgagaaattgcaaacatcatctgctctaaagcactgttaaattcttccatgttcaactccttttctttttctctgatgttcaaatttacattggcaatttttaaatctttagtacatctttgcaattcttcgtgattaaaaataagttcttgctttgctttttttaacttatctaatataatatcctgatccataatttacgattaataaagttagttaaaagtataacatttaaaacgacttttcttacctaagtacgtctaacaccaattagattctaaattccccgctttttatttcgatgttttgttattaattgattttgagagtttaaaaaagtaaatatttagtctggaaaataattttgtttaatattctaattctgtactaattatcttggtaactttttaaaattttaaaatagaattattttgcataattttaagtaaaactattttatgtataacaagtttactatttctgaaatcattcttaatatactggcacaaagccctgaaaaaacttgcccttttgaagatttaaccagtatggttattccctgtttgaatgaatccctacaagatagtttacttatccaaaggtcaaatcaggcaaaagtcttagatgcattaataatgctagatagtgaaggtcttattattttagattcggctacagatacaagcattataactattaagggactaataaatataagcagcaaaagctttctaaattgataaacagtcttttttgactttctaaatatattacccattaatacctttgttaaagaactagtaccagtataaatatcatttatctgcttattctgcatttatcactgcaatatttcacttcgtcccagattttttccgatttttttctccacgcaaatggtctctggcaaacaatgcagattttagtgggcaggttttgttttttaactcctctcatttttttgtttatttctaaaactccaaaaaatatcactggcgtattttcgagtttgttctatgtcaactataggctctggataatctcttcctaattcgcatttgtaaaattgctgctcaataagatttaatttccatggttcatgaattaattgtggtggaatttcagccagctcaggcagccatttctttataaatatgccctctgaatcgtgctgctgtgaatattttacgggattataaattctaatgctattgcctgttgttgtaccggcctgcatctgaatctgcggataatgaattccggtttcataatctaaaaactgtcttgccaagaaatgaagctcccgccagtcctgccacaaattgaatgtgaaaaaggaaaccagcatcgctcgcattctaaagttgatataacctgtctggactaaacatcacatacaggcatcaacaataggaacgccggttttaccttcctgccaggcttttatatagatttcgttttttggtttgaccaaggaatcgtaatctttgtttatattttcaaattcaatttgacagtcattttcaaatttttgcataaaatggcaatgccagtgaagtctggaaacaaaatgtagcctggctcttttgttgtatgatgtttcataaaactgattggtatattgatacaccttaaagctggtttggaaatgtggttgctgtaatttacgtgtctttcttttgcaaaactctctaagtaccgtcaggcccaatattcgccaccttgttgaaaatttttatttcggtttgtaatttcattcgaaagtactcttccttttagtttttgataaaaatcagcatctaaattttcaaatttaaaagtattcaggtcaatcattttaggaattgcgcgcattgtttcttcccagagcttatcccaatcttgttttgatcgaagctttctgataacaccatggagctgagattgtttccaaagaattttatgatcatcaaaaaaaaactgcatggcaatatccctgtcaaaagtgactttgttgccaatttcctgatgcgaaaacactgtttgaacatcataaagactgcataagtgctcaaaaacagtctggacttggttatgaaaataataaatctgcgcagcaaatgattttaatttagactgcatttcctttaaggattcataaacaaaccgccaatgacagacatcagcatcatcgcaagccattattgagggttcaaaaaaataaaccaaaagaagagggatattttcctgctgtgccataaaaagaggttcgtgatctgtaaaacgcagatcacgtttgaaccacataatatttatcttttttttattcaacttttaagcagtgatttaatttccttatcgggctttgcatagctaaatcggtctaactgcatggttttatgatagctgtccagaccggaacaagtaacggtattggctttttctaaatcgaggaaaccatcctcagacaagcagtcttcgggaataaaaatctggactatttccccgataatcatagtagtattattgattgaaatggctgttttttctttaaatttaatgcctaactgtacgttgctttcgagcacaaaaggagctggaaagttatttttatattccgcactgagtcctgcagcatcaaattctgaaatttctttattgtatctcgctgatgtctgatgtgcctgcttatagatctgttcattgatatgattaatggtatagaatcctgtatctaaaatatttctcatggtatcacgctcgggcgggctggggcgaaaaatcatacctattaatggaggatttgctccaatatgaaaaaaagaactaaaaatggataaattagtatttccctgtacatcagaagttcctaccaatgccacacttttaaaaccgcctaaactattgattaaatgcacggcagtttgcttttccattttttccagatcactggttttaaaatttattttgtttttcattagtagaaatttattaaaaaatgcaacttttcaattgatgagtatccattttttatcactgttaagtctaaaagtagcaatatgttccttattccattctttgggtcctataagtgagggaaaatcaaaaccgtctgcatctttatataagtgatatatttcacctacaataggttcaaaagaaaatctggcattgtataccaattcattccattggaattcttcgattaaatcctggtattgcatttttagttcattgaatttactttcaaactctttctttaccttatttaggcccatgcctttccatcccgctaaatcatctgcttttattaccggtgcgccaacacttgtagcatatggcaataggcttgcattataaccatgctcagaagaaaatactacattatcgggtttatctttttttatcatcttcgaatatttttattaacgcttagatattttattatttgaaattgctctttgcctgttacatttaaatctgtctattgtttcggctctctttgcagcgtgttttgttttacaattttcaacgcgaatgcgccataatttataactgctgaattttagctcttttttcattaaagctttcacatcggcttctgaaagatgaaattgaaattttattgcatcaaaaggtgttcggtcttcccatgccatttctataattctatcgatctgaatttcattcaatacaccattatcgatttttacaatgattgactttatcatacattttgtttaacagttattaaataccattaaacaaaaatagtacttttacagttatgagagaattgataatacattaaatcttaaaccatatatcttaaacctttttgatttgaaaggttttcttttgctaaattattttctccaattaacttatttgccagattaatccaattatcacataccgctatatactgcgcttttgtttgagaggaattaattttatcagaatccgaataatttatgtatttagcttttactttttttttatcctctttatttttgtctgaaatatttttagttttatctttttaaggaactttttgctgaagaaattaaattaaagtaagtgaatatgattttaatatttcttagtctccattaaatttccttgatcgtcgtaatactcgcattctccgattttttccccatagatatacatttcacactgttttagtttcccgttcttgtagtagatatcgctttcaccaaatagttctctattttcataataatggattgaagctagttgtccattgtcataataagttgtaaattctcctgaataatcgccattttcatcatatctttctacactgcttaattgtccgttttcataatatcgtgtccattttccggttttaccattgttgttatagtatccaatttccgattttctccgatttttatgatatgagattttttttcctgtaagtttatagtttttatatttataacaggcagctaaattaccgttatcataaaatgatttttctttgccattctgtttaccttttttatatttttttaaggtaaacaattgcccattttcgcggtattctttccattttccggttctattataattcttatcaattttcccttcttcttttatttttccgttggtgtaaaagcttttataattttcttgcgcgtacgaaataaaaacagagaagacgattgttatgcaggataaaataagtttattcattatggtttttgttgtaaggttttagtccgtctaaatcaaaattgctgttgtgtaattgtattatttcaatggttttctactttcgtcagattgccttgttcatcataatatttccactcgccttttttgtattcgtcttcaaaattccctatcatccgcaattgcccgttttcgtagtaaaatttccactcgccattttgcttatttttttcatagcatcccgtattgctcaattgtccattttcaaaatattgtttccattcgtcgatttttcctctttcatcgtagtttcctgttgatgataaaactccattccaacgataatatttccattctcctatgtttcggtcattttcataccgtcctattgattctaaatttccattatgattttcattgcttactacttcactagaaaaatattctttccattcgcctgtttttttattatcttcataattgccaatgctttctaattgcccatttgaataatacactctccattcgcctttttttctatatttttcgtagtttccgataaaaaataatttgccattttcatggtaacatttccattcgcctgtttttgttccattttcgtagttgccaatttctcgcaattgtccgtttttgtaatattgtttccattcaccatttgattgactaccatcttgttcaaatttgtcaacatacattactcgtccatttggatgataattttgccattcgcctacacaagttccatttttgtaatttccaaacttacgtaatagtccgctttcataatactctttccattctcctacgggtctgttatcttgataattgcctgtttccgagagttttccgtttttataataacgtttaaaatcgccagtcatcataccatttttgtagcttataactttgtacaattttttattctcgtcgaatgttttccattcgcctgtttttgttccgtttttgtcaagttttcctttttctgcaaaggtatttttactggtagatgaatgtttcttttcaaagacggaacacgatccactaactgaaataattagaaaaaatagtaaggtataggagattagttttttcattgttttatttgatgttcaaaattctaactctactagaaacagggttcgcttggcgaagtttcataacttagcccatattaatttttgggtagattttttgtgttaaaaaggaattttgaaaagagtatttttagtttttatctttttaaggtactttttgcaaagtgatcattctcaaattcttccttagttttataactaaaagtatttctaaaagctccttgtttcaaattttttaattcgtatgaatctacttctaagtatgtattgtcattaggtttgtatctgtatcttaaacaccagtcatttcctatatagtaaaccaaaacatctttttggtacagacgtttctcaaaattttcaccttctttattatacaaacggagtgtatctgtaaaataaccgtctttggtataagcttcaaaataaactttgcggttgtcatgaaattctttccataatcctgtgcccattttaaaagtggtttcgtagatcactttgccatcattatcaaattgtctaaaaatgctatcacgtagaccatgtttaaaatattcttctttccaaattccacctattgcataaacatttcctaaagtatcaaatccggcatcgccactgagccatttgccttctttatagccatcaataattttaccatatcgtacacctccttcttcaaagttttctatataagagagttctccccaattaggggagtcctcttcaggaaagtctgcgtacctataactgcctgcattaataaatgccatacctttaggagattctttaaaaggagttatccttttaaaaacgcaggacgaaaaaattactatgataattagaaatatgctctttttcattttattgatttgtaaaatttacataggattgccaagatagttttgaatattggattgcaaaatcttaattcgattttaggtattcaataattaaatctatcgcagtatctttccaataattttcagtagtactggtaaggatttcatttataaagtttatttctttattttctaacaatatagatgctttagagtaaaaatcactatattcagagaaggttttgtttgctgtgttttttattttttctaattgtttcaaataatattgctgtacttcatctggaaagtcatcctttatcaattcgtataaatcttcattaccttttaaaaacaattcttttgctttaattttttgtaattaatttaatagttcttttacttgtcacaatagtaaatgaggtttttgcagtttcgcgattgtagctttaaattctagtcactaggaacactatcagagcggtaaggaaagcaaggtaatccttcatcataaaccaacgaatcttttacataaagtctttttcctataatttttcctttatcatcatgtagtcttagcgtatctgtaaaatacccatctctagtgtacatttcaaagtataattgcccattactatggaattctttccagagacctgttccttttttaaatgtagtctcataaataatttttccattactatcaaaacgtctataaatactgtctcgcaagccatttttaaaatattcctctttccatattcctcctttggcaacgacatttccatttttatcaaaatcagcgtcaccacttaaccatttaccttctttagaatcatcaatcccagttttgccaaagctgacaccgccttccttgaaccattcttctgttggagaaattcccaatccgttattctctatttttagtttaggaggaaaatctgaatcatatttagagtgtagatacattaatgccttcgcagtcccctttatgggatctaacatttttttttggtaagatttgcaccctatgaagaatgtgtacatagttaagaataacacaaataatttaatagttttcgatgtcatcacgcatgatttttatttgattatgaaaataaactaatctggaattatgataatccatgatatttttagtactcccctgtttaaacaataaatagtttgaatgaatttgatcaataacagagtaataatattttttcgtttcaattagaactaatgagtaatcagaagcttttaagttaattttatatttatgtaattgtattttatctgtatgaatagaatttaatatttgtaaagtgcttgtgttttcttgtaaataagacgtgtttttgtcaatttcatttttgcatacagataaatattggtcttttgtttgtgtatttttgccagttcctgctactatagttgatccgggttgtcctttatattctctttcaacattagtcttcaatcttgtgtaataacttgttttatattgaaaataaatattagttttcgttattttttcaatcagagtgcttttttttccaataatagttgttaggctataaatcttatttgtttcactttgcaattttagaatcttcgtttctataggaggaataaacttttcattttttgttccatcaggattattgactggcaatccatttcctaaaatattttctctagcaactttatattcttctttttcctttgaatcataaaataaatggggtaagcctaacatatgaccaatttcatgggaataagtatctttgttatttgtattggtagaatatacgattaaagcataatgattaagaggatttgtacggctatatgctcccgtcttttcatctgaagattcgaaatcagataaaataataatcccaccctcattgaatgattttcctttatttctcaatttgtttttgtattcagatattgttatttcatccatttcgtttgctttgtcaggaagtcccaaatctttttgatcatctactattacctcagttataactggttttttattgcactctttttttatagggtcccaactttctatcctacaatttccggtaacaggatcaacatctggtttttgtttaataatactcgcaaaatacttttttttagtccaatcttccttatcaaaagcataaaaataatcatcgaccttactggcatccatagcctcaaaattttcaatctccactgcataacctgcttggttaagagagttattgtttagatactctttgatacctgcatttttaaactttttaaacaaggctttcgctttctcatttggatttccttcatttgataccagtgcaataaccctaaatttaagtttcagtactttatttttcatcatgtttagaccacctatttcgcttgggccttttgcaccagtatgtaaaaaaaagtattttttgtctaacgattctttcgaacattttattgtaagttgtagctgttcattagctactatttttttctttgttgttttgtcgttttcatcctttctttcttcttctccgtcaattttaaaactataatattcatcgcctgtaatagagatataatcatcctgactttccccttcaaaaaagacttccaaactcaatgtgacgggctcgcctggttttagtaaaacaaaaggcatttcgaaatgattgtcaaaattaataagtccgtaatttttctgaatcgcttttattgcgccaggtttatcttcgccaataggtatgatgtttcctaaatcctgagctgtgtttccttttttataaaagtattctactttttcaaagggcacaccttgtattttttgaatttccattgtttccggatcgacatctacccaatcaaaaccaaattctccattataagtttctaaagttctgactttggcataaacctttgaaatctcttttggctctgaggagtaatctccaaatataacattttttgtttgcgtttgttttgaatctatgatagaaatttctccttgtccaaaagtacagaaagcagtagaagcttctaataaacctttgtgttcactctgtaatacattactttttgtgcttgaccaaggagcttcaatagcaggttggcacggaataggcggattttgtattttacagctggtaaaatttggaaaaacaaatgttttttcattttcagtagccatcaatttatcctggataaaaattttggtttgagattttacctccaacgtaccatcttcagtgcccaaagtgcatttgcattgggcaccgttacatatatattttgccataattaatttattaatacgtttgctccttttatggttgtatctcctactgcttctacttttatagccttatttgctttaatattgatattagagctggcatctatatttacattatctccctttaaattaatgttgccggaagtgaatatatttacaccattttgacctaaaagttcaattaaattattagcatctttctttaattggattctgtttttttctaaaagaattgtgtcgtttgagtctgtaagttttatttctgctctttcattaccgctcatttcaaatgacagcttttctttttcatgatcattatataaacgagctgagatattactaggttctattaataaattagttcgttttttaccgttatcatcgtttaattttagattggtagtattttttgtcattgttaagaccgagccttctgttacaacattgtttttaaccgaattaaaagtcgttctaagactatcaggtgaaaaatgtgtaattgctaatgggttttctttttcatcaaaatagctaatcttaaagtttttgtctttgtcaaactctattttagcaacatcaagaatttttgtttcattagtttctgttgcagtatccgtttttatataacgaatgtgcagtttgttgccatcggcactataatcaaaaaataactttgggtcatttgtggcttgtattcttcccattagtctgtcgacttcagaaaactgcgaaacaaacgctcttgtttctactccgtcaataatggtcgccaaaacccaactgtcttttttaggaatggtaataactccttgttctatatcgaggattgaagctttcaatcgtacgtttttaaggatggcaccatcggcacgcataatgtttacggtataagcgtcttcaggattgtgaaatgattctatttcattatttatttcgatgacttttgcagcaaaagtttcaatcatttgatttttactagagacatcttttattaaatcggttatatttcccatgatatatttttattaaacttctactcttcgacctatgtaaatcctttgcctgtaaccattttcgccataacttcgcacgaccttttcgacctgaaaggttccatttttttctttgtctttagcattttccagaattaccttatcggttggtcgcacaaaaggctctccaaaagtgagaaaggaaccttcaaatccgctgggtttagattccattgctcgtaatgcggcgtattgatacagttctgaagccacttttgtggttgttttttcaaaagctgtaggatcatttggtaaatcatcactatcactgtgtaatacgtgggttttcactaattgcccatttgggtcacccagttcaatgtaaattggggtgtttgaatttttaaagtatttttctactcgtgtacgggtattttttgtcgattcattaactacgactaacttatcttcaataatgttgtaacgaaatctgaaacgtgctttccctaaaaagttcccggaagcggcttgaatagttttatttagttgcgtactcaaaagttcaagtccctgattgattagtttttttacaattgccccggccagaggactttggataaaattgcgatcgataaaactgcttaattctccggttgtatgtttttgcgggttattggtgattgtaagtacaggtcgggcttcttccattttaaaataggtgtagattcccttatcctttagcatttcgaaaacctgagccagggtttgccccctgttaatcattagattccctaaattttcgtcaagagcatctatcttcaatggaagatttaacggtttgattcttttttcaagaaatgtttttggattaaagttctcgacattggtggttggattagtggctacaacattcaaagtatcatttttgtcctgagcatcggtattatctactgcttttatttttttgaaggcgtacattaagtcttcacaggttatagtagcattggtatcggattgtactcctgtgatataacccctaaaagccggtttgtaatctccgtcgtatcctaaaaatatttctatgaaattttcaactttaaaaaaatcatgaattgttttttgttcaccgcttgcatttgcaaataagttctgatcaaagcctttggtatcggtatatactttttgaggcataacaatcgtggcggtatcggttaacgatttgtaggagctattgatttctacgtttttgacataggtaaattcataaaattttggagtagggataagccttaccgtttcataaactttaattttagcatttagtttaagcattgtctctgattattagttctacagtttcgtctgatgtggcgctggccgtgaatttttgaatgttttttgttccggaaattgaaggaatagagtaggagtctataaccagttcgtaaataccaaatcggttcagaatagcatgagttactctcagggcatagggagcatttagaaattgtttcaataagaaaagtttctcttttggatattcatctccactttcgtcggcaattagtccttcaatcgaaatactaaaatcaccattggtgatatgttctttaatggttgaatctctgccttctattccttcttttctaataacttttgagcgatttaaattaactgttacagcatctatgcgcagactcggcagattgagatccttctttaccagaggttcaaaaattaggggagcaaagactctaaggttaaattcacctccggttttatcgataataaaatctttcgattccgattcgttatagttaatacctgtatattcagtatcttttgagtctaagatttcgtttacattaaaattgaatttcattgttttttagtttttagttggagaatgttttagcaaaggccgtaataaaggtattttcgagtctggtttcattgtgtttctgcagccaaagcgcttcttcgatgagcttataaaattcatccatcggtaattgataaggatctacctgaaaagcctgacgaatcagagctgctgactttttgaattcatctttttgaggtgttgcattgattttaaattcactgtctttttgaatcatggtaacaatagaatttcctgcagaaagcatgaattcatcatcataattttctttttccagtaaacattcttcaaacaaaaacaaaatagcttcatgcggatcatcattgtatcgtttttgataattcagaaatgttgtgagagttggttttttgcaatatgctgttatagattggtcatcagaggtaagttttaatacattaccatatttttcttttagtttttcgattgctgtttcgtctaacatttttttgattttaagaattttgatgttttaaatagaactgtctgtactttctcttttcaggatttcggtaagactttcagtgctttgtgactgattcaaaggtgtaatgttaaaatttccaataataatgttgccttcgggttgctgccccaaagggtttttaaaattgctcatgtctggtgccgaaggtatttctcctaaatctctggatgtagaattcatgattgatttgatgtttaaaggttggtattgctgtttaagatattctcaatagatgaggtagttactttcgggatattcccgtaagtaagcggtgtttttatattgattttgagagtgctaaccgattttattagcagctgtaaaaataagagataaagagcgaaaaagggaaaaatttggttgctgctttcagtagtttcagtagaaagtaatttaattaaagtcttggtatgtagtagtttgtgttgaggttgtgaataagggagaaagaaaagagataagcctaaaagagtaaaaataatctcttttaggctttaacatattggttaaataaaatttgagttcaacaatgatgagtatatttaaaaatgttttctcttttttctataataaaggagtagcataagttttaatacttaaagcatctaaagcatcacgttcttcataaaataatttatgattaaatttattcatctgaatttttatttcatctaaatctactgaattgatgtaaacatctcttccggatgcagaggaggatctgtttaattatgtgttgaaattaaatttttatataatttatttggaatataaagatttaaaactatatttgtgcaatcgattacatttatttaattttgttgcatttaattcataggtattgtaatttttatatcgtgtttgaacagcagattaaatgagccggaaaactatcaactttataataaaccattaccatgaaccaaacagatgcagttattatgacccaatccaaaaaatctacaggaagttatcgttggagtatatgtggattgcttttttttgcaaccactatcaactatttagacagacaggtactttctttaacgtggagcgattttatcgcacctgagtttcattggactaataatgactacggaaatataaccgccttgttttctattttttacgcagtttcattactgtttgccggtagatttgtagattggatggatactaaacgaggatttctgtgggccattggtatctggtcttttggggcttgtcttcacgctttttgtggcattgccacagccggaatcattactgggaactggtttgtaggtttcgagggcgccaaggaggcaattcaccttgtgaaagacaccggattggtcattaatgtaagtgtaacgctgttcatctttgcccgttttgttttagcggtgggtgaagcaggaaattttccggcagcgattaaaacgacggctgaatattttcctaaaaaagacagagcattttctaccagtattttcaatgccggcgctactgttggtgctttggcagctcctatatctattccgtttatcgcagaatctttcggatgggaaatggcctttatcatcattggtgctttaggttttgtctggatgggattttggattttcatgtatgataagcctgaaaaacacccaaaagtaagtgcttcagaattagagtatatacaacaagatgatattatagacagcaaacttaaaggctatgtgccggaaaccaaagacaaagtttcttttgtcgattgttttaaatacaaacaaacctgggcatttgcttttgggaagtttatgaccgatggggtatggtggtttttcttattctggactccggcttacctaagttcggtttacggtatggattctactgaggcggctcttcctttattcgttttatatatgataaccctgctgtcaattataggaggctggctgccaacctattttgttgagaagaaaggaatgaacccctatgaaggcagaatgagagcaatgctaatttttgcatttttccccttgttggccttgattgcacagcctttaggatacatcagttattggattcccgttattattattggtatcgcaggtgcagctcatcaatcatggtcggctaatatttttacgactgtaggggatatgtttcctaaaaaagcaattgcaacgatcactggtattggaggtttggccggaggcattggttctacttttatcaataaaggttctgggatgctgtttgattatgccaaagaaagcaatatgtcatttatgggttttcacggaattgaagccggatattttatcattttctctatttgcgctatttgttacctgacaggctggtctgtaatgaaaatgttagtacctaaatacagtccgattaccaatctttaaggattacagataaagaaacaattataaaaaaagaataaattttacaatcaattatggtttttaaggataaaaatctaattttgtgcaatcgattacattaatttaaaattatgacaaaatatagttcaagatacgcgtcaagcccggaagctgtaaaaaaatatgacactcaggaattgagaaacgaattcttaattgacgatttaatgcaggaagatgagattgtgttaacctattctcattatgacagatatatagcaggatcggcagttccgttgaaagatcttactttggaaagtattgatccgttgaaagcaggttactttctggaaagaagagaaatgggaattatcaatgtaggtggcaaagggactgtgattgttgaaggagtttctttcgaattagcgtttaaagatgctttgtacatcggaagcggtaatcaggaagtgatctttaaaagtgatgatcctaaaaatcctgcaaaatattatatcaattctgctccggcacacagcacatatccaaccgtaaaagtgagtttggcagaagcaaacaagctggaattgggaactatggagacagctaatcaccgtaccgtaaatcaaatgattataggaggtgttgtaaccacttgtcaattacagatgggaatgacggaattaagacccggaagtgtctggaacaccatgccggcacacgtacacgatcgcagaatggaagtttatttttatttggatattcccgaaaatcaggccgtttgtcattttatgggacagcctcaggaaacgagacacatttggatgaacaatcatcaggcggttatttcaccaccatggtcgattcattcaggatccggaaccagtaattatacttttatctggggaatggcgggtgagaatttggattacggagatatggatgtgtgtaaaatcactgatttaagataaaaaatatggcaaactcattatttgatataaacggaaaagttgctctgattacaggaagtacacacggactgggaatggcaatggcaaaaggattaggagaggcgggtgcgacaattgtggtaaacggaaattcttctcaacaaaaaattgatgatgccgtagcggaacttcaaaaagaagggattcatgcagtggggtataagtttaatgtaacggacgagatggaagttatcgctgcagttcggaaaattgaaaatgaagtggggccaattgatattctgattaacaatgcagggattattaaaagaattccgctgattgaaatggagatagccgattttaaagaggttattgatattgatttggtgagtccgtttattgtatcaaagcatgtggtgagagggatgattgaaagaaggcagggaaaaataatcaacatttgttcgatgatgagcgagttgggccgtagtacagtaggagcttatgctgctgcgaaaggcggtttgaaaatgctgaccaaaaatatggctaccgaatgggccaaacataatgttcagattaacggaattggtccggggtattttgctaccgaacagaccaaacctattagagtggacgggcatccttttaatgattttatcatcagtagaacaccggctgcaaaatggggagaagcaagtgatctggctggagcggctatatttttatcttcaaaagccagcgattttgtgaacggtcacattttgtatgtcgatggtggaattttagcaacaatcggaaagccatcaaacgaataattatttcaattacattaaaaaaatcatgagttcaaataccttcataaacgataattttttacttgaaaataaatttgcagaagagctgtatcataattattccaaaaatcagcccatcatcgattatcacaatcatttgaatcctcagtttattgctgaagataaaatttttgaaaacattacgcaggtgtggatcaatggagatcactacaaatggcgtgcgatgcgtaccttagggatcaacgagcagtttgtgactggaaacgctcctgacaaagataagttcttaaactgggccaaaacggttccatatactatgcgtaatcctttgtaccattggacgcacttagagttggcgcgttattttgatatttatgatttgctgaatgaaaaatcggcagagaaaatataccaggaagcaaccgagaaaattaattctccggcttacagcacgcaaaatctgcttaaaaaagtaaatgctgaattggtttgcacgaccgaagatccgattgacagtcttgagtttcatcaaaaattgacaaagaatccaattggaactaaaatgagtacagccttcagacctgataaagcgatcttaatttccaatgatggttataatgcctatttggacaaattaggagaggtgtccggagttgcgattcatacctatactgatttgtgcagtgtattgcgaaaccgaattgagttctttaatcaaaacggctgtaaacttagtgatcatggtttagaccagatttacttcgaggaatttacagagaatgaaattaatagcatcttcaaaaagaaaagagaaaacagaattttaactcccgaagaagttttgaagtttcaaagtgctgtattgttattcttgtccgaaacgtatcatgagtttggatgggtgcagcaatttcaccttggtgctttgcgaaacaataatgctcgcatgcaccgaattttaggacctgacacgggttgggattctattggtgattatccgcaggcacaaaaactatccggctttttaaatgccctggacagtaaagataaattgacgaaaacgattatttataatctaaatccggccgataacgaagtgatggcaaccatgattggaaattttaatgacggaagtgtcagagggaaagttcagtttggatcgggatggtggtttttagatcagaaagacggaatgacaaaacaattaaatgctctttcaaacatgggtttaatcagctgttttgtggggatgctgacagactcgagaagctttttgtctttcccaagacatgagtatttcagacgtattttatgtaatcttttaggagatgaaatcaaacgtggagagcttccaaatgatatggaatggatagggaaattggtttcggatatttcctatcataatgcaaaagagtattttaaattttaagagagaagttggatgttagatgccagtctcagttttcagtctcagtctcagtctgggactgaaagctgggactgagaactgagactgagaactgagactgagaactgagactgaaaactgagactgagaatttctaacaataagtcttaaaattcatttaaccattttaatctgtggcaaaaaaaattaacttgaataaagtagttgcattcggggaaattatgttgcgtctttcgacagagagacacttgcgattttcgcaggcaaaagcatttggagcgtcttatggaggcggtgaatttaatgtttgcgtgtctttggctaattatggtttgaatgccgaatttgtaactagattacccgagaatgaaattggtgcttcggcagtaaaagaaatgcgaaaaatgaatgtagcgtccggaaatgtagtttacggaggagagcgtttagggatctattttctggaaaccggtgccggaacacgaggcagtaatgtggtttatgatcgtgcacacagttcgatggcaactatcgaaaaaggaatgattgactgggagaaagtgcttgagggagccaattggtttcactggagcgggatcacaccggcaatctcccaaagtgccgctgaagcctgtttagaagcagttaaagcagctcataaactgggaattacaatttcctgcgatttgaattaccgatcaaaattatggcaatacggaaaaataccaagtgaagtaatgccggagctgctgcaatacagcaatgttattttaggagatattgataccgcctattttatgctgggaattccgaaagtcaatccgaattatcaggatgagaaatcgcttccggttttgtacagcaaattgtttgatttgattccgggtttaaaaatagcagcaacaacccttagatattccgtaagtgcatcacatcaaagaataggaggggttttatttgacggtaaagccatttatcaggcagccgtaaaagaagtgactcctgttgtagatcgtgttggaagtggagatgctttcatgggaggtttaatttacggattacagaaatatcaaaacaacaatcaaagagctttagattttgctgtggctgcttgttgtttaaaacataccattgccggagattataatctggtaaccttaaaagaagttgaaaatatgatagatggtgatgctaccggattagtatctagataattgatttaaatatggcaaaatattcgagaattgaagtggcattaacgatgaaagagaacggaatggttccgttattttttcattcagatatagaaataagtaaaaaagtgctaaaagcctgctatgatggtggcgcaagattaatggagtttaccagcagaggagattttgctcatgaagttttcggagcattaaataaatatgctttggcagaattaccgggaatgatgcttggtgttggttctattactgatgcggcttcagcatccttgtacatgagcttgggagcgaattttattgtgactccggtttttagagaagacattgcaattgcttgtaatcgacgaaaagtactttggtctccgggctgcggaacacttaccgaaatcgcaagagccgaagaattaggctgtgaaattgtaaaattgtttccgggtgatatttacggacctgaatttatcaaagctataaaaggtccatgtccgtggacgaatattatgccaacaggtggagttttgccaacagttgatagtctgacttcgtggtttagtgcgggagcaacctgcgtgggaattggatcacagttaatttcaaaagagatattagagcaacaggattatgacggattaaaaacaaaagttagtcaggttctggatattataaaaagtattaaaaataaataagggtaatcatataggtccttatttaacatgcgtttttttttagattttagaaattgtaattgagcattacgcttgataaatgaatcttgtgagtcctcacagcaagatttgttttcctcacacaagtgtaatgtttcttttacagtgagaggaaataatcagagataaataaggtattaaacgtgattatttataacactttaagagaaaaagtaatggaaaaattaaacagagtgagctcagggctttcagaaaaacttcctataaaaatagttcaatttggagaaggtaactttttaagagcctttgtagaatatgcttttcaaaaattaaatcaggaagctggttttaatgcaggaattgccgtagtacagcctatagacagaggtttggtgaacatgattaatgctcaggacggattgtataccttattcatgaaaggagttaaaaaaggagaagagattcaggaaaaagaattgatttccaatatcgtaaaagcaattgatccttatgcatcttttcaggagtatctggctttggccagggaagaagaattggcttttatcatttcaaatacaaccgaagcaggtatagaatacatcgaatccgatcagttgagtatgcagcctccggtttcctttccggctaaattaacggtgcttttatatgagagattcaagcattttaaaggagcggcagataaagcattaacgattattccttgcgaattaatcaattacaattcagatactttaaaagaaattattttaaaatattgtgctgattggaaattagaaaatgaagttgttttctggttgacaactagttgttcttttcataatacattagtagacagaattgtaccgggctatccgaaagaccagattgaagagtacaacagtcagttggattataaagacgatttaattgtaagtgccgaaagtttctttttgtgggtaattgaaggagatgataaactgaaagcaaaacttccgtttgaaaaaacagcgctggatgtaaaaatcgtagccgacatgcagccgtatcgtacgcgtaaagtgagaattcttaatggagcacatactgctatggttcctttctcaatgctttatggcaacgagactgtaaaagaaaccgttgacaatgcttttaccggtgattttgtaaataaagctgtttttgaagagatcaatgaaacgctgaacatggataaagcagaattggcgagtttctctgaagaaattctggaccgttttagaaacccgtttatcaagcatttactgtcttcaattgcattaaactcgatttcaaaatttaaagtgcgcgtattacctagtttaacaggatatgtagatattcatcaaaaacttccggttcatttaacgtttgcttttgctgctttgatccgtttttacaaaggaagctggaagggagaggttttgccaattaatgatagtgaggatattgtttctttttttgaaagtctttggaaatcggatgattatgaaaaaattgcacgattgactttgcagaataaaagcttttgggacgaagatttaacactggtgccgggattaacaaaagcaattacagtcgcattggaagaaattgatgcaaacggaattgaaaatggttttaccaattttcaaaaacaaataaataatataactcagaaagtttagttatggcaacgcaaaaaaaattaataaaagttcatcctacagataatgtagcagtagctttggtaaatctttcagcaggtgaggtgattgattttgaaggttcggctgttactgttgagagtgatgtgaagatgaagcataaaatcgcgatggttccctttaatacaggagacaggattattatgtatggagttctggtaggaaaggcgagtgctaaaattgaaaaaggaggtttgctttctacggctaacgtaaaacacgaaagtgataaagtaaccggaaaaacagaaacgattggctggacggctcccaatattgagaagtggaaagacagaactttcatgggctatcacagagaagacggacaagttggaaccgagaatgtatggctgttttttccgttagtattttgcgaaaacagaaacatcgaaattctaaaagatattttcgaaaaagaattaatgaagcccaaagagaacgattatcaattgttacttcgttctttggttaaatcagaaaccggtggagccggaaatgaagccgcttcaaacgatgctaatttattcaataacattgaagtaaaattcatcacacatcagggtggttgtggaggtattcgtcaggattcgcatagtctggctaaattattggcaggatatgtaaacaatccaaacgtggcaggagcaactgtattgagtctgggttgtcagaacctgcaaattcaaatctttaaagatgctttagatgcgataaatccaaacagtaaaaaaccggttttgatttacgatcaacagcaaatcgggacaatcgaagccatgctgagcagtgtggtaaaagatacgtttgaagccattaaaaaagcaaacgaagtacaaagaactccggcacctttatccaaactaaaaataggtttagagtgtggtggatctgatggattctccggaatttcggctaacccgacattaggggtgacttcagatttactggctgctttaggaggaactacaatactttcagagtttccggaattgtgtggagtagagcaggaattagtcaaccgctgtgtagaagatgaaagtggagaacgctttttagaattaatgaaatggtatgaaaaaaccgtggtagatgccggttcaggttttgatatgaatccttctccgggtaatatcaaagacggattaattaccgatgccatgaaatcggcaggagccgctaaaaaaggagggacatcaccaattaccggtgttttcgactatggtgaatacatttcgaaaccgggattaacgctgctttgtacccctggaaatgatgtggagtgtacaacggcaatggtaggttcgggagccaatatggtattgtttaccactggtttaggtactccgacaggaaacccgattgcaccagtagtgaaaatttcgtctaacaccgacctggctaaaaagatgtccgatattattgatattgacactggcggtattatcacaggagaaaaatccatcgacgaaatggctgatgaaatgttggagtttatcatcgatgttgccagcggtaccattaaaaccaaagctgcaatcttaaaccaaaacgattttattccctggaagcgaggggtttcactctagaaaaataaagcattatataaaaaaaactcactgttaagtgagtttttttatttgaaccattaagatattaaggttcattaagcagtatagtggttatgcctaacgggttaattacaaaacttaacttgtcttaatatatattaaattatctaacgttgttaagcttttaagcctgaatttctatataatgagcctcccagtcctattttaaaaactggtattaaattatttatcactgttaagtaaaatgagaaaaaaggtttctaaattactctattaaattatttatcactgttaagtaaaatgaaaaaaaggcttctaaattactctattaaattatttatcactgttaagtaacaaggcaaaggtattttttaattggctattaaatcatttatcacttttaagtaaaaatgaattttttagtactgtattgattttatgataccaccaatcgcatcttttaggatttgagcgttaatggtttccaggatgtcacttttgttaatgatattaatggcgatcagaccatgaataacagaaaagaaagtaaaatatttttgtttgataatgtcttcacttggattactgtccttcataacttcagcaattaccgaggtaaacaatttgtaaggtgcttcctgagccgaacatcgttgtgcacagcaggtcatttgaaccccaaacattaattggtacatttcagtattagtaaaagcgaaatcccagtaggtcatccacatggcttctaactgatcttcgggtttttcaaacttatctttagcagtttgtaactctttggccagtttcaaaaaacctttaccggttagttcttccagtatcgcttctttattcgaaaagtattcgtaaataattggagcagtatactcaattctgtcggcaattttacgcatactcaaaccattccagccttcttcttttacgatatcataagcagccccaagaatgttatttctggtctcttctttttgtcttaaaattcgatctttactagccattttaattgagtattaaattgtttaacaccgttaggcaaatgtaggacggtttttctgattatgaaataattttgtcataatattttcttatcgtgtcataggtaatcaataaaaacctcgtgaagtccttattttattagctttttagaaatgtagatttttttagaagcagcacattttggcgcttttaaaaccatttgtcctgcttttcgctaaatctttttctgttctcgttaaagaaacgagaacagaaaaaggatatcgctgcaatcagggctaaacgagggacatatatatatcaacacaaaatgttgtggggttgataggagttattccttttattaacgattttagctcttcatttaagagataattttattacagctgattttataattagtgttctcttttggtctaaatatttgaaatgtttaaaaagaactgaaagcccaaaagcataaaaatagtgcagcgcactataaattaagataatgaatcatattgccctgaaggggcaaaagcagttatcaataaagtataagatcttgattaaaagttgctaactttcggaaatgtcatcaaataagataggtgctttttgggttatgctttcgcccttacagggctaaaagaggtgctcatcattattcatggcactttgtgccatgttactgctaaggctttttcagagcagcagatttcaaatacttgtctcttatgggtaagctgtaaattagtattattacaattaagaaattttaggaaaatgtaaatctttaaaagattgcaaaaggatgccactttcattcctaaagtgatttacgataaagggaatagtatttttatcactctgcaacttttgaacctgattctctttagactgactaatacttaagcctaattttataaattcacaggttttcgtattgattccgaggtactattattgttatcagagaaactgaattctgacaatttaatagccttgttttatatgctttttcttacttttatttgtaattgtttctatcttcgttacgaagtaaaaataattatttaagatagtaattttgctatctttgtaaaatcattatcagatgaaatcgagagaatttattagggaggctattaggaatggatgggtattcttaagacaaggcaaaggaagtcacgagatttatgagaaggatggtaagcaggttgtaattccaaatcacggatcaaaagagattggaaaaggattagaacagaaattaagaaaagaaatggggctttaacttcttcaaaaaaggattgaaaactatgaaaacaattagaattattatcgaaagaaacgaagacggtttttggggatatgcagagaatgaaaatgcaattgttggtggtggtgatactgttcaaaaatgcaaacaggatgtactcgattgtatagcaactttaaaagatttggatagcaataacagaccttcctttcttgaaaaagaatatgaattagtttataaatttgatactgccagtttgctgaattattacaaaggaatttttacaaattcagctttggagagaattacaggtataaatcaaaaacagattcagcattatgcatccggtcatcggaatccgagattagcgcaacgaatcaaaatagaaacagcacttcataatttaggaaaggagcttttggctgtggaattataagttttaatccgtggagtataaaaaaactaaacacatagaaacatagtttttaaacgtataataaggatataaaaaaaacatatttcttacatagtaaagtctctgtgtttgtagaataagtaaaacgccttttttgtaagtgtaatatctatgtttctatgtgtttaaaaataattacaaagggttaagctttatttatttcacatctcacattctcacattttcacataatccatttcgacgtgttcaattcctgcatccaggaaaaagttatcggtttgtttgaatccgtttttgatgtaaaaacgacttgcattgacttgtgcatacaaatagatcttctcctcatcttttaaatccgctaagattttttgcaggattgcttctccaattcgtttcccgcgataagtattcaaaacggcaattctttcaattttaaaacccttttccatttggcggtaacgcgccgctccggctggcaaaccattaactgtggcgagataatgaatcgcttcttcgtcgtccatagattcgcgttcctgtgatacattttgttcttcaacaaacacttgacgacgaatagcaaaagcaatttctattaatttgctgtcgtcaattttctcaacttttacagtatttcctgttgatttttgagcagattcgctcttcatttctttaattgtggtcattcggtcaaaaagatttttagtttttaaattttgggttacttcgtgtatggctttaaacaaattattttcggtatctgtgagttcaatcaacgcttcggtcatgatttgccataaaggctgtaattgatcgatcatctcgttggctttgtctgtaagggtaataaggcgttttctttcgtctttggcatctttcgtcgaaccaatcagttcttttttttccagctctttcagtaacgaaatagtagtaggatgggagtagccaatttcctgagaaagctcgacaacactaatggcttttttctgcgaaagcacatacaccaccggaaaccatttgggttcaaaatcgatgttctgacttttgtagaataactgcgcttctttcctcaggttttcattcaaacgctgcaaaagattccccaataccaatgactttgattgctctaataccataaaaaataattttagttcaaatttacgtagttaactacatatgttgagatgagagagattaattttaagatttttttatctttttttacttttgttattggctaaaagcaatttgcaggaccgaattaaaatctgatcctgcaacaaggttttttatgtaagatgtgaaaatgtgagatgtgagatctgtttatttaagtatcacaacttcttcaggaactttaaacaataacacacaaccggttttagaaaatacagagtgactgcttcccggtggcatgtacatataatcgcctgtttttaattcgtcttttccggagcggacttcgccttcaagaacataaatttcttctccggcgggatgaacatgattaggatacgaagcacccgcttcaaattttagtaaaaaaacagtgggtctgttggtagcgggatcaaagtataaggatttggcggaaatgccatctgtttttacaccttcttccattagaactttccagtctttttcgctgcttcttgtgatttgtttttccattatagtaatttttagtttgttttatttttcagaatgatttcgtctaaactccagtggtatttttcttcagttgacaaaagaaaagctgccatagaaaaggtaaatacagaataatctaaaggctcttttactccaaaagaataagtcatggcaagtgcaaagccaaaagttaaaatggcagcgccaacagccgcaaatttcgtttggtagccaatgagcaggaggaaagccaatagtgtttccaaaatagtcgatgttatggcaatagcaggaatccagtttttaggaacaaaagaatttacttgttccgtataaaccagaaagttttcccaacccgaagaatgttctccccataatcccagccgacttgaaacagcagataaaaaacctgctgctaaggcaacccgcaaaagcaaaacggcatatttctgattttttttcatctttttgattgcttaattattgcaatacaaagatgcggaaggcagtattgctaaagaatagagaatcctcgaaaaagcatgtaattaaactttttcagagtttttttaatatggaggaagtatagaattagaatcttaaataaacgtattttatttaagcaaacacggctgtctatgagttgagaaacgagtttctcttttgcaaaatctttttacagcacataatatctatgtttctatgtgtttaaaatcaacgtcctattagaagttagtcgctttttctttaaaagattttggggaagtgttggtgtgttttttgaagaaattagaaaaataaaaaggatcattaaagcccaaggcataagcgacttcttttaccgatagtttctcgtaagtaaaaagacgtttggcttcggaaatgatcaatccgaaaattacattttgagccgttttattggtatgcagtttcgaaagttcgtttagtttcgattctgttgtaccgatcagtgttgctatttcgtttacagaaaggtttttgtcgaagttttgtaaaatagcttccagaaaatgaagaaacagcgcgtcgggtttgtagatttcatccccgcgattaattttggttcggttgatttcaatcaatatcaattcaattcggctgtgaatagaggtgaggtattgatagggcatttgtagtaattctttgcctatcgtttctaattcctgaacaacaaacggactattgtccaccacaatcatttcattcatggcaaagtgacaaaacagtccgttgtggaaaatcaattccatatccgtatcgtctttgcagaaaaaattataggtgaattctaaaacaaatcccgtcgcattccctatgtttttaaaataatgaatctgaccggaagtaatggtgataacagcattttgggttaaggtaaattcattttcatctacagaaataacagtcgaacccgaagtgcaatacacaagcacatattttaaaacgcgtctgggttgttctaaatctgtcgcctgatcgaatgtttttatcgaaaccatattgaggatagtgtttgatcaaaagtaagatttatttcatgaagttgatcaaagagggtatacagatttgttctgttattgcattttggggtactgtgtgtgaatttctgttctgtgtagttggaacgcacaaagcacacggatggtactgattcgctttgcgaagacgcggattaacacagatttttttatattattaggtagaagttaattgatgtcttcaaaatattactaccgtaaaaatccgtgtagatccgcgttttcgtgaaacgaatccgcgcaatcagcgtttctttattattattctgataatgttttcagcaattgttccaggttgtcgatactcattttaaacccttgctcgaagcccatttcaatcattttttccagacgttccaaagattcattgaaaattgagatactcaccttggtaataccgttttgttcgctaaagctatgatcccagttggagcccggcagttcgcgattttcattttggtccgcaaaagtattgaacatcttaaaatttgtctttggcgtaatcgaagtgtattcctgaaccgcccagcgttcgaatccttcaggacttaccatggcatagaatctgcgtccgccaacttcaaaagtcatgtgtttcgtttttgacgaccagggttttggagctacccattggtccagaagttccggtttggtaaaagcatcccaaaccaacggaagttctgcattaaattctcggtttatgattaccgttttggtggctttgtctacggtaaaatcaaattgcaaatcgtttttcatttgttctgttttttaagcgttactaatagttcgtcaagctgattgaacttggtttcccaaatcgctctgaattggactaaccattgatcaatctctttcattttttcaatttcaagcgaatagtaaatttcccggccttgctgttcctgtttaagcaaatcgcattcgacaagtatgcgaaggtgtttcgaaaccgactgtcgggaggcgttaaagttctctgcgatggcatttggtgtcattgcctgtacagcgattaacgttagaattgaccttctagttgggtcggctatggcttggaaaatgtcacgtctcataatattccggttttaattaagaaatcaattggttgcaaatatacgtgcaactattcggtttcgcaattttttgttgaattatttttgagaaattttaaagaaatgattttttaagtagcagaatggtagtgttttaggtggttgttttaatgtttcaagtttcaggtttcaggtttcaggtttcaagtttatgcagtcttgtcatttcgactgaaaggagaaatcacacaagaaactccgcaaagcatgtcgccaatctttgtcgattaacaagtgtgatttctccttccagtcgaaatgacaattactggtgtcacaaaaaagatcattacataagttttattcaaaatgaaaattaagaaattcgaaagtcggattaaaacttcgtataagttcaattttcttatcacgtctccacttttttaattgtttttctcttgcaatggcttcctgtatccaagtgaatttttcgtagtaaaccagaaactggatattatattttgaagcaaacgttttattattcagctctatattttctttatgttttgaaagcctttgctttaagttattcgtgacaccaatgtaaaaagtagtacgatgcttatttgttaaaatatatacgtagtagctatgaaagccaatttgtggattcagcatttttcttttttttttgtacgaatatacttatttttactatttgtcatttcgaccgaagggagaaatcacacaagaaactccgcaaagcatgatgccaatctttgtcgatcaacgagtgcgatttctccttccagtcgaaatgacaaaaatgcgataaatgcttactgaaatatagatttcttatatttgataaatgaatgtaatttattgagagaaaaatctttctttttcaaataattttctctatatttgaagttcctataattacgactttaaattagaacaagatttgcccttgtattatgtgtacggtatcggaaacgaccgtaaacgctgtcgtaggcgttaggaacactaatatgcaagggttttgtattcctattaattacgacattatgaaaacaaacaccctttccaaagaagccgaaacaaggcttattgatttttttaatcacaccatcgatcctaccgaaatggcaaaagccataagacaagccaatcacatacttgctttaggagtcatcagagaacacgaaattatggagaaagaaagaaccagtctggaaaacagcttttattggctcaatgaattggcggagattttgaatccttatttgtgtgaggagtaagtttataaaatggaaaaacctcgatttttagaagtcgaggtttgttcttagagatatattgtattaattacttggagggcatagattacaaatccgcgctattgggagtattattttatcatatttacaaatttaattagattcttttctggatcaatttcaacttgataaaagtgtcttgcataaatatcagctccatttcgagttcttttatctatggtaatttttaaatcatccattcgataaccagcaaaatgcccataagtaggaaaaggtaattcatgctcaatatcaattttctctcctattttaggattgaatattttttttaagcttaatggtaaaagtattggtctaatatcatcaatgttctcaaattgtcgatttgactttaatatgacattttggtgtttagttcgtccttccagtgttgcgtagccaaccaattcgtaatttcctctatgaattagattagagtgcttttctatttctttttccgaagattttattgacttaatgatttcttttttctcatcttgagtaatgatttttgctgaatttttaattgctcgtactaggtttaagaaaaaattatcaaacccatttgaaataaattttactctattattatcagttggtaaaacaacttcatttgataaatcagcataaagtaaatcagataattcatctggaattttacattctctatatttgataggaataatcttttggattagtccagtacgttgattttcgagtgcttttttcaattcaaaaatcacccaatcagattcaatcgatgctggagataatataatcactagatgtgaagtttcttctatagcattttctagtttatttactaaactgtcgccaaagtctaattgatcttcatctacccatgtttcgatagtattttctaacaaacaatctttcaagtgtctaacaaattttttgtccttgctactatgggatataaatattttcattaaagtttattttagtcacaaattttaataatgctaacgataaaattgatgtttattttcgtttagagaaagaatttagagaaagtataaactcttactgtgagctaataattagaattgaagttgaatattcagttactttaaaacatgattcaaatgatcttttatatcatatagatttattccaaaattttccgcatcctgtggtcgtattgcgattattagtttgttggaaaatttaaattgaactgaagcttttgtaaatgattcagctattaaggcaatcattttttttctactaattttcactcgtcctcttcctgttccaataacagggataacaagctctataagttctccttttttcccaacgtaatcccataatccaattaaagaagcttgaatttcagaaacagaagatgaggcatttcctccttctccaagttttgacatagctgtaaaatagaatgtttttccatgagtatgaataggaacagtagttccaaatggataaggaggatttgtatcaagtttttgaagttcgtcattaattttgtttattaattctatctgattaccagtataatattttgctgtaaattgaccttgtagactatcaactgcaattttgttgccagcaacatcagcctcaaaaatggtatttgtactaatcattgttgctccacttaaattaaataaatcagcaatacaaacttctatagtaaaatcatgttctggaaatggaatagtaatagattttataggcctcttaagaagtattgagattaaaattgataaaattataaagatgaaaaatgcatacgcgccatatttatctttcgtataaacattaaaaaagtctaaggtttctactataagccatattatcccaaaaatagctagaattgattttaagcctgacaaagagaaaatatatcgccaatatgctccgactgtagaacattttataatagtctgtagaacttgttctacaattcaactaataattaattctacaattttcctgatacaaagatacgatttttgaaaaaataagccggattatttacgaaatcgtttgatcaggagcttgtagtgcacctcaaaatcaccggacaaagcactgatttctaacccataaccttcctaatttcgaaaaaaaacagctattctcacaaaagaccttctctccatttttaaagattgacctgaatgaaaaacacatgatttctgtcgaaaaaagagctgatctgaatctttagtttcagcaaaaaattattgttatttaacgttgaagaaaatttatttgtgctcgagcaaacggtctaagtccgataaggtataaaacttgagatcgtttaacttcatgtacctgcagataaattctaaagtttcgattttagtctgataattttcggtaacatttctaacgggtttatgaccacataaaatcaggattttgttgtgttgttttgcatagtgcaataattccagaagatacggaatactgaaatgaatatggctattgtcgatatcaaaggcaaatacaattttagaattgttaaaatagctgtcctgtttttccggaagttctcctccaaaggctcttcctcttataattttaaatttgggagataacgctttgtccaatgcatcagatcttaatccgtatggataagcaaaggtggtcattttaaaagaatgttttttcatggaagcgatcataggggtaatttcctgatcaatgtaagcatccattccatttttattgacaaatttaacggcattatagtgatgatagccatgtccggctatttcatgtccgtatttttgcatttcaagaagtttttcgatttgcggtttcccaatcgaatcaatacggcagacattaaaagtagctttccaggagtattttctcaaagcctgatcggcttcggcccattcgtctacataggcatcatcaaaagataaaattacaccagcttcataagctttgacgcctggattttgctttttactttcgcaggaaaataaggtcagacaaaatataaacagtaccgatttaaggaaaaacatcttcataaaatatagtctgaaaaattaaaaaaacacattcttttttttaccaatagaatcttattatttcaaagataattctttttcccagttttctgccattaaaaaagccttcaaaatgttctcactttgaaggctttactttttatgatttattcgtatttcaaatatttcaaaacatctattttggttacctgataggcttttgccaacacaattgacaaggttaaaaagagcaacaatacaaaagcaactataaaaggaagcaaaggaatttctatccggaaagcaaagtcctcaagccattttcgcaataaaagataagcaggaattattccgattgcaaaaccaatcatacaaaaaacgacatattgtttcgataattcaccgagtaaaatagtggtgtctgctcccaatgtttttctaatcgcaatttcccttactcttctttccattgaaaaagaagctaaagcaaacaatccaaaaacggcaataagaatcacaactccgtttaagagtgaaaacagctggctttgtttctcatacactttatatgtccgggcaaagcttctgtcaacaaaattgtattcaaaaggatattctgcatctacttttgttatccaaaatttatttatagccgcaattgtttcgggcatatcttgtggtgcgattttaaccgaaatgttaagcaaatccttttccatccattcgaaagctttgatgtgcatgaaaatcatgggcgaaatactattttcaagtccaaagtaattgaagtcctttaccacgccaacaacttttaattttctatcttcccagatgatttctttgttaataggatctttttctaagagtgttttggcggcagcttcattcaacaaaacattactactactatctgatgcaattttgctgtttaaatctcttcctttaactatccggatccccaaaacattcatcatcccaaagtcaatcgccatctgctgtgttatcacttctttatttgctttgtagtgcatgcctgaccatgaattaatatcgttaccgatagaaaatacccctgccgaaactgccttaacgccttttattttcagaagttcctgccgtatcgttttgtatctttcaaattgattccttcctttcttaggtttaaaagaaatatccatcacctgagcacctttaaatcctaaatctttatgagccatataattaacctgctggtatactataattgaaccaatgataaaaaatgtagcaatagcgaattgcaaaaccaacataccgtttctaagccagattccgtttttgctgcgggaaaaattccctttcaaaaccttcaaaggctcgaagttggagacatacatcgcaggcaaaactcccgaaaccgtaatgacgattataaaaatgaaaattagctgtaaataaaactgagagccttcaagaatcagctctttgtgcaaaagtgaattgtaaaaaggcaatgaaagttcaacaatcaccaatgccaacaaaagtgaaaaaagcgtgatcagagttgtttcaaaaacaaactgagtaataatttgcgattttgtggcaccaactatttttcttactccaacttctttagctcgctttacagcatttgcggtggcaaggttaacataattgacaattgacagcagtaaaataagaattgataatcccattaaaatttttaaaaaccgaagattggctcctccttccggaaaagggtaacttccctgatacaatcttgttcctgaaaacggaagtaacttagctttttctacctctccgtactttttcaaataaccttcataagtgattccttccgcttttgcctgctttttgactttcttttcgatatagatggtattcaaatttttgagtattgctgtcgtgtccctctgcttttttaactttaacattaatccatagcgcagtccccagctttctctgtttttatctatttcgtattcaattatagttgtaacagcattaggcattactgaagcttttttagacaatcggtatacgccccgaacaataaaaattttgtcggcatacttaacctgctttcctattggattttcacttttaaacaagcgggaagctgtctcttcagaaaaagcgatgctgttccgatcgtaaagtgcgctttttccactgccgtgaataaactcaaaaggaaaaaaagaaaagaaattaccctgccctgagaaaattttatcgactacttctattctaccattgtactgtattgtttctctggcataattgcttgtaaaataacaataactctctaaaggcgggctcattctttttaaaagaggtcccggaataggcgaatttacagcccaaacattgcccccgccaatattgttcaggaccgtataaattctatctttctcaggattccactcgtcataagagtgttcatcattccaatacagagtggcaaagatcaatcctgcaattccaatacttaaacccaaaacattcaaagccgtaaaaaacttgttgtttttgatgtggtaaataaatatgttgatccagttctttagcatgttattcgtattttaaatatttcaaaacatctattttagtagcctgatacgctcttgttagtaccactactaaggttagcgtaagtaaagcagtaaatccaatcacaaagggatatacagagatattaattctgtaagcaaaattttctaaccatttgttcaacagataatatacgggaaacaatgctatcaaaaaacctataatactgaaaaccacatactgcttacaaagttcttttagtaaaacattggtttccgcacccagtgtttttcgaatcgcgatttctttcatacgtcgttcgatagagtacgaagccaaagcaaataatccaaagagtgcaatggtgataacgataacatttaataaagaaaatagatttttctgcctcacataattactatacgatcttttgtaccctttatcgacaaaatcataggaaaacggatattctgtatctacttttttagtccacatactttcgatatccgtcagcgtttgctgcatcgttttggggtcggcagtgatataaatattattcaaaagttctgtaaaccaaggtactgttttaaaatgaaaaaaggacatcggaggaatagcctgacccggatccatcagattaaaatcttttacaactcccacaataatggcatcctgaccattccagtttatctttttccctatcggatctttttcgttcaataacttgagtgcagtctcattaatcaacattgaactgacagtatcctgagcaaatttgggatccaaataacgccctttaacgattttaatcttcaacatttccaataatccaaagtctattggtatattttctccgtctacacttttatctttatattgataggttatagtcgattttggaccatatcccaagacaaaaccgccacccgaaacttctttaacccctttgatatgaagcaattgattcctgatgctagtatatcggtccaatcgctctttattgctgattttttctccatagatgttcttatacgaaatgttcagaatttgttttccattaaaacctaactctttagagttcatatgttctatttgctgatacacaatataagatccgataataaagaaagcggccacactaaattgaaaaatcaacataccattacggagccaaataccgtttttacttcggccaaagtttcctttcaacacttttaaaggctcaaaattagaaacgtaaactgccggaagtataccggccaatacaaccgttataaaaaatataaccaccagctgcaggtaaaactgactgctttgtaatacgagtgatttttctaaaaaggcattataatacggtagcgaaatttccacgataaccaatgataccaaaatggcaaacaacgcaatgagagccgtttcaaaaacaaattgttgaattataccatattttgaagcacctataatttttcgaactccaacttccttcgctctcttcaccgcatttgccgtagctgaattaacataatttacaatcgataacagaaggattaaaaccgataaccctaccatgataagtaaaaattggaaattccctttcgattctgtcatacctccggttttggtatgcagacgaactgaggccagagactctaaacttggttttacttcaccatatttgcgaataagttccttaggagtaattcccttctcttttgcaaatcggaccgtcaggttttcaaaatatattttttggagattttttgctacttgtttttgattcccctgctctttcagtttcagtaataaaacatactgaaagtttccccataactgaatgtttgcattaattcgctggtccataaaattaacaacacaggaaggattataggctgattttttatccaacttataaacgcctcgtaccatcaaaactttcttctgtaaaactacttttttgcctacagcagtttgatttccaaaaagcttaaacgctaaatcctccgataaacaaatactgtttacatccggtaaagctccctttcgactgccctcagtaaattcatacggaaaataatcaaagaagtttccttgggcaatggtaatcttgtccgattgtacttttttgtccttaaaataaagaatgtcattatcataacctccgtttaaataacaaaatgattcgacttcaggacttgcagcttttaacgctgatcctaccggtgctgagctcgaagaccaataggtcgtagcattcattttattggttactaaaaaaattttgtctttattagggttccactgatcgtaggattgttcatcgttccagtacaaaatagcaaaaattaatcccgcgattccaatactcaagcccaaaacatttaaagctgtaaaaagcttgttgtttttgatgtggtaaataaatatgttgatccagttctttagcatgatttagtttattgaatggtttactaaaacatctacatttctatggttcattttctccgaaagaataacgccgtctttcataacaattgttttttgcgaaaacgaagcatcataatctgaatgtgtaaccattagaattgtcgcacctcccgcatgaagatctgtcaacaattccattacttcattaccatttttactgtccagatttcctgtaggttcatcggcaagaataattttcggatcattgattaaagcccttgcaacggctacacgctgttgctgtcctcccgaaagctgctgcggataatgtttcaaacgatgtgaaatgcccaatatagtagccatttcctgtacttttttctttcgctctgctgagggaacattattataaatcagcggtaattcaatattatcaaagaccgataattcatcaattaaattaaaattctgaaaaatgaatccgatattttcttttctcgcttttgattttaaattttccttcagaccgatcatttcctgtcctaacagttcataacttccgccggaagcgctatccaataaaccgataatgtttaacaaagttgattttccactacccgaaggtcccatgatcgatacaaaatcgccttcgtttacggttaatgaaatttcgcttaaggcttttgtctctacttcttcggttctgaaaatttttgaaagctctttaattctgatcatactactttgtttttgatgtttgtttttctttttgagaattttattgccgaagtaaaaaacagatcctaaattaagataattgataagataatctataaatatctatttttgttacatttaccggcaataatcattctcctatttgatgatttgttaatagtaatatgattttcgtgccaaaaatttaaaatttataactgccttattttaaattttttagtatttaaaagaatccgcaagtgtccaataatggacagctttcgtccaaaactgaacaaaaatgaaaaagacaaatgccgcaatattaatcatagacgatcaggaagacatcctttttgcgtcgaaagtgttcctgaaaaagtattttgaagacatttatacgctcaataatccgaaaaatattgtcgaattattgtcacaaaaacacattgatgttgttttgctcgacatgaattacagaataggttttgaagacggaagagaagggttgtatctattaaaggaaatcaaaacgctttcgccaaaaaccgttgtgattctaatgaccgcctttggcaaagtcgaaacagctgttgaaggtttaaaatcaggtgcttttgattatatattaaaaccctgggaaaataaaaaactactggaatcggtcaaacaagccgtcgacaaatcccgaaaggagcaaaagaaaaccaggtatatcgaaattgaaaatgacttttttattggtacttccgaaatgatcaaaaaatcctattcccttgccgataaagtcgctaaaacggatgccaacgttttgattttgggcgaaaacggaacgggtaaatttgttttagcacatcatatttttagccaatccgaaaggaaaaaccatccatttgtagccgtcgatctgggagccttaaattcaaacattttcgaaagtgaactatttggttatgccaaaggtgcttttacagatgccaaaaccgatactcccggacgtttcgaaatggcgcaaaacggaactatctttttggatgaaattgggaatgtaccgctgcatttacaatcgaaactgttacaggttattcaaaccaaaacagtaaccaggctgggtgaaacaaagccaagaccactaaatgtccgaataattacagcaaccaacctaaatcttaaacaagaagtttccgataaaaactttagagaagacctttattatcgtatcaataccatggaaatcgttctgcctccattacgggaacgtcatgaagataaaattccactggcagaatatcttctcgacaaaatgattgcaaaatacgaccgaaatggtattcaatttgacaaaaaagtactggaacaaattgaaaaacatgcctggaatggcaacatcagagaaatggaaaataaaattgaacgtgccgttattctgtgcgaaaacaataaaatcaccatttccgatttagatttagagaccataactccctacgaagaaaacccggatgacattcagctttcttccgtagagaaggccgcagttgagaaagccttgctgaaaaacaacaataatatcagtaaaacggctgaagaattaggattgtccagaggctctttgtaccgtcgtttagaaaaatacaacatcaatatcaactaatatgttcagaacatttcaaacctataaattgttgtttttaagactgatcttaattgttgtgatgatcgaaatctccttgctcttttttaagaaagagttactctttaccggaatatttggtctctttattgtctttctgctcgttcgcgaaatgtacttttatgttcgaaattttgttttactctacaacagaactatctcctctatactacaaaatgatttcagttcagacttttcacagcataaatacaataaaaactaccacgaattacttctcctgtacgatactctaaaaagcaaacaaaacgaacagatctccaaagacattgtctatcgttcgattttaaacactattgaatccgggattatcattctgcaaaaagaagaaatggaatggaacattttcctaatgaacgatcatttttcttctcattttaatgttcccaaagtctccaaatggaaatatcttaaagaccaattaccttcgttatgtgaagttatcgaagctgacgattttcaggaagtcaaaacctccttagaaattcgggtacaagagcaaaacatgcaaacctttgtgttgcaggcttcgcgtacagaagtttttggaaaagattactttattgtcttactggattcgattcagaatgtagttgaaaaaaaagaaaaagatgcctgggtaaacttaatgaaagtcatttcgcatgaactcttgaattcgatcactcccattcgttctatttgccagaatctacaagatctggttgatcaggatactatgtccgctgaagatttggaagatgtgaaaaatagtgtcgagaccatgttgagacggagcgatcacctgcaaaaatttgttgaaggttatcgaaaattggccatgctacctacaccaaaaaaagagaaagctgacttacagctactgatgcacaattgtcttcagattatggctcccctgttcagagaaaaaggtattgaagttgtcaacactattacttccaaacactggattacgatcgattcacagcaaatcgaacaggtttttatcaacctattgaccaactgcatctatgctttaaatgatgtcaccgaaaaaatagtaacggtgtcatcagagtttaaagaaaatagggttttcattaaaatcacggacaccggaaacggaatcgaaaaagagattgagaacaaagtattccttccttttttcaccacccgaacagaaggcgccggaattggtttaacgttatctaaaaatatcattgaggcacacggcggctacatcacgcaccgtaatgaaaatggtaaaactatttttgagatttgtttacttgagtagtaaataaattgtttaaaaacgaaaatacacagtttatccacttcctatttttttccttttctattaattgaattggtaatactcagagtaattgaaacgtttcttttaaatgttgtagtagctgatattttcaatattcttactgaacttcttattcctaaaccttcttttattaattgaataaaactttaacttattactagtagctacataatcattataccccttgtgtttcaatccaaaaggataataattattctcgtttataaatattactcttatatattaatataaacatgtatatatgtattgtatgtatttttgtaatgcgttatatttgcattcacaaaattataaacaatgattaagattactttacccgacgggtcaattagagagttcgcttcaggcgtaactccgatggaggttgcgaaaagcattagtgaaggatttgcaagaaacgtgatttctgcatcttttaatggtacaacaattgaaaccgaaacccaattgacgaccgacggtagtcttactttatatacatggaatgatgcggaaggaaaaaaggctttttggcattctacttcacacgtaatggcacaagcccttgaagaattgtaccctggaataaaactaactctgggacctgcaattgcaaatggtttttattacgatgttgattttgaagatcaaaaaattactgacgctgatttcaaaaagattgaagatcgtgttcttgaaatctcaagaggaaaacacgaattcaaaatgcgtccggttagcaaagctgatgctttagaaatgtacaaagacaacgtttacaaaactgaattgatttcaaatcttgaagacggtactattacattttgcgatcatgctacttttaccgacctatgccgtggtggacatattccgaatacaggaattatcaaagccatgaaagttatgagtgtagccggggcctactggagaggtgacgaaaaaaacaagcagttgacccgagtttacggaacttctttccctaagcaaaaagatttaactgaatatcttgaacttcttgaagaagctaaacgtcgcgatcaccgtaaacttggtaaagaacttgaattgtttgctttttctcagaaagtgggacaaggtttacctttatggctacctaagggagctgcccttagagatcgattagagcaatttttaaagagagctcaaaagaaagccggatacgaacaagttgttactccacatattggacaaaaagaactttatgttacttcaggacactatgcaaaatatggagctgatagttttcagcctatacacactcctgccgaaggtgaagaatttttattaaaaccaatgaactgtcctcaccactgtgaaatctacaatgtaagaccttggtcctacaaagatttaccaaaacgttatgcagaatttggtacagtttacagatacgagcaatctggtgagttacacggactaactcgtgtgagaggatttactcaggatgacgcacatatcttctgtactccggaacagttggatgaagaattcaaaaaggtaatcgatttagtactatatgtatttggttctttaggttttgaaaactttacggctcagatttcattgagagaccaggagaatagagagaaatacattggttctgatgagaactgggaaaaagctgaaaatgcaattatcaatgcagcagccgacaaaggactaaatacggttgtagaatatggcgaggctgctttttacggtccgaaacttgactttatggttaaagacgctttaggcagacagtggcaattaggaactattcaggtagattacaaccttccggaacgttttgaattgacttacaaaggtgccgataacgaattacaccgtccggttatgattcacagagctccttttggatcaatggaacgtttcattgcaattttactggaacatactgcaggaaatttcccactatggctaatgcctgagcaagctataatcttgtctttgagcgagaaatacgaaatatatgctaaaaaagttttagatttgctagaaaatcacgaaattcgcgccctaattgacaaccgaaacgagactatcggtaagaaaattagagatgctgagatgcaaaaaactccatttatgctaattgttggtgaggaagaggagaaaaacggaacggtttctatccgtcgtcatgggcaagaaggaaaaggtaacattacagttacaatcgatgaatttgtcgctattgtaaacgaagagataaaaaagacattaaaagtttttacagtttaacttaaattataaagtcatagcaataagaagcaacagaggttaccaacctcgagtagaaaaaaaggatgcccacagaataaacaacaatattcgtggcgtacaagaagtaagattagtaggcgaaaacatcgaaccaggtgtatttaagcttgctgaagctttacgattagcagatcaatttgaacttgatttagttgagatctcgccaaacgctgagccaccggtttgtaaaatcatggattacaagaaattcgtgtacgaacaaaagaaacgtgataaggtgttaaaagctaagtctacgcaggttgtcgtaaaagaaattcgatttggacctcaaacggatgagcatgattacgaatttaaaagaaaaaatgcggagaagttcctgaaagaaggcgctaaactgaaagcatttgtattctttaaaggacgttctatcatctataaagaccaaggtcagatcttacttttacgtttggcaacagaccttgaagagcacggtaaagttgaagcgatgcccgttttagaaggaaagagaatgattatgttcattgctccgaagaagaaaaaataattatttgctttaagcaataagctttaagctttaagcaaatagtttatttaaactcctgcttagagcttaaagcctaaagcctaaagcttttgaagatataagtaagtaagaataaattaaaacactaggaaaaatgcctaaaatgaaaacaaaatctagcgccaagaaacgtttcaaagttactggttctggaaagattaaaagaaagcatgcttttaaaagtcacatcttgactaaaaaatctaaaaaacgtaaattagctttgacacactcagcgctagttcactctacagatatgaaaagcatcaaacaacaattaagaattatctaataaaagtcgaaagttagcaagtcataaagttggaaagtcagtagctgactttaaacatttgacttaaaaaccttagactagagaatttctttaggtttaaaattatttatataaccttggagtatggcttttaagttcctttgattcaattcaggacgcctgctacaaaaacacattaaaattatgccaagatcggtaaattcagttgctaaaagagcaagaagaaaaaaaataatgaagcaagccaaaggtttctttggtagacgtaaaaacgtttggacagttgctaagaatgcagtagagaaagcaatgtgctacgcttaccgcgatagaaaacaaaacaaaagaaatttccgtgctctatggattcaacgtattaacgctggagctagattagaaggaatgtcttattctcaattcatggggaaagtaaaagctaacggaatcgaattgaaccgtaaagttcttgcagatttagcgatgaaccaccctgaagctttcaaagcaatacttaataaagtaaaataaacgttttataaactcaatttagattacttacttatcatagaaaaaccatctcatttaaacgggatggttttttgcttttagagttttttttattcaattaattatattaaaataactttgtagtatgaaaaaatcacttcttattttattagcgctacattatttgaatagcgaagcacaagaaaacaaacttgaaaagaatactataaatacaatcattggactaattgacaaacgagatttaaattgttcaactgaaattgagagagccaaagcagattttaaatcaaaagaagtctattactacatccaacctgaaggctatattgacatcaattataacagacatttcccattcttaaaccaattacttaagaaaaaaggaattcaattcttatcatcaaaagaagtagaaatatcctcattttggaaagagactaataatggaaactatccattaaaaactaattgctattgcaaagcatccaataaattattaaatataaaatatggccataatttcacaacaaaaattgaacaaacagccgacagtttgtatgtaactgatagaataaatgatattttcgaatacccaaatgaggtagatcattactgcataatatatccaaaagctacagatttccctgatcaaaaatttcaaatacaaaaggattttttttcaaattttaaattccctgatggttttattcataccataaataaaagagatttcatagcaaaaacaaggttaataataaggagagataatagcatttctgatattaagatagatattgaatttgaaaatccagaaaataaaaaatttcatagtgaaataattagtcaacttactcatcacattgaaaatgaaaattggaaagcggctacttctaaaggcataaaagtaaatagctcctttgagattaatttttataattaaatgatcggctttttcgagtttgaagaattattgttctaaataaataaacgttttataaactcaatttagattaactacttaccatagcaaaaccatcccgctgaaacgggatggtttttttgctttatatccgtttgccaaattataatttttaaaactacatttgtataaaacctataaaaatgtataccgctctttttactcatatcggaaagtttgtaactctggaagcttctgagattgatctcttagaagctgttttaagtttagcaatcattaaaaagaaagaccatgtacttcgggaaggtcaggtttgcaacactctatattttatcgttaaaggatgcatgcgtcaatatatcattaattcgaaaggaactgaacaaacactacaatttggaatagaaagctggtggattacagattacttaagctaccacaaccacgttccttctcatttttatattcaggcggtagagaattctgaggttattgccttagagcagtctgtattggagtctgtactaattcaagttccaaaattggagcgctactttcgcattgtttcccagaagtcatttggagctgcacaaatgcgaattaagtttctgttcaccatgtcggcagaagaaaggtatcatcactttaataatctgaatcctgagttcgttcagcgcgttccgcaatacatgcttgcctcctaccttgatttctcagctgaatttatgagcaaaatcagagccggtaaagtttaattctgagaaactacgattctcaaatactaaaccactaagctcctactggttttagagtatcaaaaaaaataaatcttgtccatttacatacctcgttagcgaactcagaacttaatacctcagaatttcagcaactcgatagttttcttgaagtagttcaagtttttcaaagcagacatccatgatctttgtatcaaactttaaaaacacttcaaatgaaaccaagaatcgttatcccaacagttgcaccgcaggcttaccaagcattacttaacttagaaaaatacatctctactacttcacttacaccagtacacaaagaattaattaaaattcgtgcttcccaaataaacggctgcgcgcattgtattaatatgcacacaaccgatgcccgaaaacaaggcatatctgaacagtacatttatttactaagcgcctggcgtgatacggatatttatactgaggaggaaaaagctattttagctctgacggaagaagtaacactaattagtcatcacgtttctgatgaaacctatcaaaatgctgcaagtctattcaacgatcaataccttgccgaaattatccttactattattaccattaactcctggaatagaattgcgatcacaacaggattaagagtttcataattgtttcagaaataaatcataccgacagtacaaagaaagctttcatacctgaaagctttctttgtatttacctaaaaatcaaccctaaaaaataaaatcaaattttatagaaaaacaggtatttatacgcttttttaagaactttaattctttacttttggcgcatgataccttacagaatgcgcattttcctatttattacctttacttttttttccctgcaatcctgtcagaaaaaaacctcaaatactcccaaacccaaaaacacaaaacccgaaattgaagaagcaatactaactgcagatcgcttttacagccaaaaagaatttgacagcgcctttttttattacaacaaactacgatcgatttgcaatccggtaacagattcggaaaactacattacttctctgaaccgaatggcagagatacagcaagatcacgctgattatacaggcagcgaaaataccattaaagaagtactgccttatcttaagtatgcaaaaaaacaatcgcaaatatggagcacttatgttattttaagcatcaactacttaaatacgtacgattacaagaacgccatattatacaaccaaaaagccttacggttacaaacagaagagtggcgaaaactagcagcaagaaataacatcgctgttatcttaatggaagaagggaaatacaatgaagctctccagatctttttgtcgttgacaacaaagaaagaagttcttaacaacgatgaatttcaaaacaaagcactggacaatattggattctgctactttaaaacacacaatccgaacgaagctcttttatattttaacaaaagtcttgaaataaggcaaagaaaaaaccgtccttttgatttaggtaaaagctatcttcattttgcaaaattctacgagaaaagcaattctgctttagcaaaagaatacatgttgttaagctatgaaaaattcactgttgccaatagtgtcgaagacagaatgtcctcactggagctgctgattaaaaatacttctgatcaggaattaagaaaatatgctacaaagtatgtaaatatagtagatagtatatttgaagtaagacagaaagtaaaaaatcaatttgcaagaatcaagtacgattctaaaagagagcgagaagagaacttaaagctaaagtctcaaaaaatcgaaaatgaattacaaatagaaagacaggagaatagaaatattatatcctacatcataattcttgtggcattaagtctagttgtaatcctgtatttttatctcacatctcgtgcaaatcgacaaaagatcgaagcaacttatcaaagtgagacccgtatttcaaagaaaatccacgatgaactggcaaacgatgtttatcacactatggcatttatcgaaaacaaaaatctctctatagcgaaaaacagagaaaatttattaaaaaacctaagagacatctactcgctaacaagtgatatttcaaaggaaaactgcccacttgttgctaataaaaactatgctgcttctttaaatgaaatgatctcagaatttaataattccgaaacaaatattctaactaaaggtttagatacaattttatggagtgaaattaaaaaaaataaaaaagtagctgtctacagaactattcaggaattattggtcaatatgaagaaacatagttccgcaacctcagtccttataactttcaaaaaaacaaacaaaaacatactaattatctacgtcgataacggtaaaggtattgatgcaaatcaagtacttactaaaaatggcttaaacaatatcgaaaatagaatttttgctataaacggctctattgatatcgattcttttcctgacaagggattcaaagtttttattaaattccctataatacgatgaaaaaattgatatttacgttcttatcaaacaagaatattacaaactgtttaataagccttctaacagccttaagtatattctttttcctagaatcctgctcgaaaaaaagagatacggaatctaaaaaaacagatcatacccgggaagtaaaaagattgacagttattgctgatagacaatatgaagaagacaaacttgatagtgcttttcacaactataataaaatcatactactcgctgatattaaaaataatactgtggattatgcagatgccctaatcgccatgggatatattcatcattcgcaaggtgattatatcaatagcgaggccgttactacaaaaattttacctctactcccacatttaaaaaaaacaagatttgcctggaatacttataatattctgggtttaaattatcttgctaccaaagattatgacaatgcgcttttatatctaaaaaaagctttagccctaaaaacaaacccgtggagacaacttgaaactttaagcaatatcggccttatttatatagaacaacaccattacaagaaggcaacagacctctatcttaaaattacaacacaaggatattatgccgataaaaaaaagcagcatactcttgatgcttatgattatactgaatatgcaaccatgatagacaatttgggaaactgtttgtttaaactaagaaaccctcgggccttagtctattttaatgaagcattggaaataagattaaaagtaaaagctgatgaagcattaccctttagttttaatcatctttccgaatattatttatcaaaaaaaacagccctgtccaaccaatatgcaaccatgggatacaaggctgcctgcaaaataaacgctttcggaaccaaaaaaaaatccctaaaacttttaatagcaaccagtaccgcaaaagacttgaaaaaatactccaatgcttacatcaaacttatcgatagtatgtcagttgcccagaaaaaaacgaaaaatcaattttccgtaattaaatacaatctcaatcaaagcaaagaagaaaatttacaacttaaaatccaaaaagcggcacacgaactgcaactcgaaaaacaaaaaaacaggtctataatttcatacgttatcatctttgtgatcacaatgctatgcatgctgacatttatgcacttacgctcaaaaaacagaaaagaaaaaaaatatgcagttctcgaaagtgaagtacgaatatcaaaaaagcttagtgacgaattaacggataatatgtaccagatattagatttctcatcaaataccaatctcaatcaagaagaaaataaaataaaattactgaatgatcttaatacagtctactccaaaacaagaaatatttcaaaagaaaatagcgctatagacaccaatgaaaactatggccttgtattaaaagagatgcttatagaatacaaaacacctgatttaaatattatacttaatggtttcgacacaattaactggagagtgcttgaaaaaaacaaaaaaataatcctttacagggttcttcaggagctatttggaaacatgaaaaaacacagtcaagccacattagtcatcttaactttaaaaaaaaccaaaaaaaaattgattgtaatttataatgataatggcgttggaaccactaatagatcaataattctaaaaaaaggattacaaaatgtggaaaaccgtattaaaactataaatggaaatattatttttgactcaaattctacaacaggttttaaattaagtttcaatttccccaaataaacaaaataatatgttcaaaaaaattttagttgccgaagatttagacagtatcagcattgccgtaattcaagcgcttgaagaactaaacgttcctgtaattgaccatgtcaaatagagtgagcaatatagattttttcttgttcagattatctaatctttttgcttaatccccaacttttgaacctgatcccggacttcgcgtaaatcttagcgctctttgcggttaaaccaaacaaataaaaacaaaaaatccacaaagcttaaaaaaaactttgcggactttgcgtaaaccttagcgcaccttgcggttaaaatcagaatagccttaaatcaaaaaagccatccacaaaagtggaaagcttttcattggtctaactactaaaccagctacgagttacaaagtcgtagcaaaacaacacaactaatcttagataccgtatttgggcaaaaaagcctttccgttaagaaaggctcttcccaatattgcggtctggacgggactcgaacccgcgaccccatgcgtgacaggcatgtattctaaccaactgaactaccaaacctctgcgttattgcggttgcaaagatagtacagaatttcgtttctgcaagtgttttttgaaaaaaaattaaataaattttcaaagttttacccaaagttttgtttttcaactaaatatgtcgtcaatattttttcaaaattgtcccctacatttaccggaacgtacttaatatggttctttgcacaggttaaagccaggtttttaaaatacccttctacccttttttcatattccgcttttacgttatcagcaaaaatcgatacttcttcacctgattccaggtcaataaacttgcgcggcgtgttatcaaagtcaaattttaattcggtttgatcgtcgactacatgaaacagtaccactttatgtttgttgtgtttcagatgctgtaaggcattaaaaagcttctcatcctcttcggcctgaaacatatctgtaaaaagaataatcatcgaacgacgatgcattttctctgcaatctgatgcaaatacgtaatcgtatcggtacttttttttccttttggctgttccagtaactgttctaatttattgagcagcattctgtgatgacgatcacttcctttctcgggagcataatattcataactgtccgagaacacgctcaaaccaacagcatcgcgttgttttttaaggatattcatcaatacagcagacgccagaacagaaaacccaattttcttttcgtaaaagggctgatttgattttagttcaggataatgcatagacgatgaattatcgacaataatatggcatctcaaattggtttcttcctcaaaacgtttggtgtacaaacgatctgttttggcaaacagcttccagtcgatatgtttagtgctttctccggcattatacactttatgctcagcaaattcggccgaaaatccatgaaacggacttttgtgcatccccgaaataaacccttctaccacctgattcgccaacatttcgagatgttgaaaactggagactttttctatttccgattcaattttcattcggtttcttttttaatattttgtgcgcggtacaaaccatctgttgcctgcattaattttcttttcagaattggactaaaattaggattctcttttaaaaatcgctgtacctcatcaaaagcatatttcgatgaatatttcccaatggtattgttcagccagtcttttggaaagaagatatctcccgttctctgaatttcatcaaccaaatctagcgaaaatctaatatacctctgagcactttcctgacgtaatggatgatttatattcgctaaaccaacagaaacccatgcttctttttctctgttggcatcgtcttttaaagattgtacaaaagcatcacgtaccccttcgtctttagataatgaaggaagcagaaattcaaatcgtttttgcttgtcgggattgctaatcgaagtcttggtcttattcagaatcccatctgctttttcatgcttaaaaattgccagattcatggccatgttcgtataatcgtcttcgtttaatttcaaacctgaaattaccatttctttactccaaatcgcatataattttgcttttcctgaatctgaataagcaatcgaactgaacaaattaaacaatgttttcttgatattgctaggcaaattggtcttcaaacgatccaaaactacttcttcaagctgtttttgtgctatattttgctgtttttgagtgagatatttccaaaaaacagcactggtttgattcgtaattattttcagcaccaattcattttgctcctgctgaattcctttcacaaaacaatcgaaagcttttgccggagcaacatttcccgttaaggtattttcataaatattaatataagttgaagctcttgccacctcatcctttagacttaaaacagaatctaaattattcccgtcaagcggaaaaacaccatatccaaaaccattataattgtaaataacagctattggtttttcaagtccaattgcttctttgagtgacaaacttttgtcttttatagtagcactgatcacttttacgttgttgggataaaccaaaccaatatcaaaaatctgaggccatacattagccgaacgatcttctgcctgctgtgtaatttcaaagctcgaaattcggttttgagcatcgtaggtaatcttatccgtaaaaatggctcttcctgattgatttacccagacttcgctccattttttcatatccaaaggtgtttcggcatccagaatttccaccagattgttccagtcagcattgtcgttggcgtactttttaatatacttttcgattcctttctgaaaggcttcttttcccatcgaagcttctaactgacgcatcataataggggctttgttgtaaataatagctccgtacaatgaacccgcatttttaagattggcaagattttgtttgattggatgcgtacccaacgagcgatcttctccatacgcattaggatagtgtgcggttagaaactgtaaattatggttgactttaggaaaaatcggattcataattttatcggccatgaaattggcaaaaacctctttcatccagacatcgtcaaaccatttcatggtgaccaaatctccaaaccacatgtgcgaagtttcgtgtgcaatcaatttagcacggtctaatttttcactgtctgtggcgctattatccagaaacaaagttgattctttatactgtatcgctccaacatgttccattccgccatactgaaaaacaggaatcgaagcaaaatcaagtttttgaaacggaaacggataattggtgtatttttctaaaaaatctaaggattgtcggtgcaaattaaaaatagtatcggtacttactcttattttttcttcattgttttcgcgatacaacatggtcatttccttaaatcccaatttctgcgttaccgttttgaattttcctgcaacaaatgaaaacagatacgtactcattttatctgattctccaaacccccaaaacatataattaaggtttttaactactgcttcgtgcactcctgtaattggggcattagataaaactacccattctttaggaaccattaaacttaattgataagtcgctttaatatccggttgatccaaacaagggaataaagtactggcacgatcgggaaccaataaggtatacaagaaatcatcatttcggtttaaggacaaatttcccgctataaaagaaatagcaattctgtttttccctaaaatcaagtctttagcagcaataataatatgtcctttctcatgaacaatagcagtgtttttattattaacctgaatcgattttatgttctgagttttctctttaaaatccaaacataaaggttcactcaaatctgaaattgtcagatttaaagtcaaactcgaattgatttccttttgtttttgcggcggaatctcaaaagaaagtccataagtcacatttgagatttgtttttttcgaaaatgtgctaactgttctgaaacaccgtcctctaaaattaatttttctttttgtttcgattgggaaaaaccaattgtagtaaacacaaaaaagcagagtaagctataggaaattttcatttttaaaggaaattaagattcgttaaaaataaaaaaagtttgccactaatctcacgaatgagcatgaattaaaattcttttgccacagattgaaagaactaataccgattgtatattcaatatagtccaattgcattgtactattttcatattacatcggcattatatcaaaaagcattggactaaaatataagtaaaattgatataaaaagatttttcaatctgttaaaaacctttaaacataaaaaaggtccgactttcgccgaaccttctttatataaattataatctttcgattacaacaaagcgtctaaactatctgcgtaggtttgtttaggagcaactcctacttgtttccctactacttcaccgttatgaaaaaccaaaacagttggtatattacgaacaccgtattttgcagcaaattcctgattagcatctacatctactttacctactacaactttacctgcgtattcgtcgcttaattggtcaatgattggaccaaccattctacaaggaccgcaccatgctgcccaaaaatctaccattaccggtttatctgacttcaaaactacttcatcaaaagtagcatctgtaattgctaatgccataattttttgtcttttaaaattattgtctgaattgtttcgtttcaaactagaccacaaatttaaaaattaaatacaaatgaaacaccataaccaaattagttttcattataaatgtattgtcattaattatattcattcaaaaaacaaaatttataagttttaacctactcaagtctaaattgtatctttttaaagaaacctccatattttcccttatctttaaggattcagaaaattcttcccgatgaaagcagctttactccacatcaaaaacttttttcaatcgcttcatttaaaaaaatacgccagacgttttagcattttcatattaggaatcattactttactccttcttgcctgtggcggattatcgatttattttaaccaaaataagaccgaaattatcactaagatcaacaccaaaatcaatgaaaacatcaacggtaaatttcatattggagattttcattataagtttctgactggttttcccaactttactttggccttaaaggaggttgaagtcaaagacaatcaatggcccacacaccagcatactttattaaaagctaaagaaattgaggtgcgcctgaacatttggagtttggtacatgacgaaatcaacattcgtaaaatcctcatcaacgacgcggctatctatgtgtataaagcgccgaacggctactcgaatgccgatatctttaagccgaaaaagaaaaaagcaccggaagaccaatcagataccgaaactacaattgaccagattgaactaaacggagttcattttacgttaaacaatttgcttgggcataaattgtttgattttgatgtcgatcgcttacaatcgaaagtagagcatgacggcgacaactggcaaaccgacgtttatctaaacacccaaattaaaagtcttgcttttaataccgtacacggaagttttgcaaaacaaaaagaacttaaaggtacttttgcagtagcttactctgctccaaaagaaagaattgacgtggtgactaaggacctaaaaattggaacagactcttttgatatcatcgctttttttaatctggctaaaggaaatgctcttttcggaatcaatatcagtacatctattttgtggcaaaatgcggcaaacttattatcggcaaacatcagttctaagcttaaccgatttaatctgaaaaaagaaattgaagtaaattgcgacatcaaaggcgactttaatgccgaaggtgatcccagaattgtcgttcaggcaattgccaaaaacaacgaactttctataccggatggattgattaaagactgtcattttaaaggcattttcaccaataatttcaaaccaacggccggttataacgatgccaattcggctattattctaacgaaatttacgggggaatacgaaaacattccgcttaccattccgcaattgtcgatcaataatctggagaaaccgcttgccaccggaaatctaagttctgatttcgatattgaaagactcaaccaaataagcaacgacaagtggattcagtttacagccggtcatgccaaagccaacctaaaatttcaatttgacattgttgatctgtacattaccaaaccgcgttttattggcaaaatagatattgacgacgcctcgtttcattatattccgaagaatgttcgtgccgtaaaaaccaacattcatcttgactttaccgagaaagctttactcatcaaacaaattgcttacaaacacaataagaatacgattttcgtcgaaggagaaattgacaatttcctgaacctctattatgatgctcccgaaaaaatgattgtcaattggaaaatctattgccctaatatcgatctcaaacaatttctgggcgttctggccagttcacaaaaagtaaaaggctcggccaagactgccaaaagacccacgatttcgaatcatctgagaagtgtaattgacaaatgctcggtggtgatcgatatcaaagccgacaaaatcaattacaacaaactcattgccaccaataccatagcccgaattcagatgctggactcgaaactgctcattaaaaacggctcgctgcaaacgtctggaggcactattacttttgacagtgaagtggtgccaaacggaaaaaactatgctttcagttcgaatgctcaggtaaacaaggtcgaaattgcaagctttctgaaatcgtttaacaatttcgggattcagtctttcagccccaacaacatcaaaggaaaactaacgagtacagccagtgtaaacggttttatcaatagtcgtggcgaattgattagcaactccatgcgcggaaaactggattttaaagtcaatcagggcgctttggttaactttgaacctattgtaaaaatcggcaagtttgcctttccgtttcgcgatgtcgagaacatcacctttagcgatttgtccggtcagctcaatatgcgtggagagcagatcgacatcaacaatctcactataagttccaacgtgttaaacatcgatgtcaacggaatttactcttttggccgaggcaccaatctcgccctcaccgtcccccttcgaaactctaaaaacgacgccaaactcgccacccaagccgaacgcgacgccgtccgcgaacgtgggatcgtcctacatttacttgccgttgacgataacggaaaaatgaaaattaaatgggggaagagggataagtagaattattcgcaacaccattccctcccaattttgtcattctgaggaacgaagaatcacaccagtaactcgacaaaggcttgccactctaagcgaagtcgaaaaatcgtttgcaacttgaaatttgggctttaaaaatattggaatttcaatttaaaggagctgcttacttcgtcagttcgctttggctcgagtcctgctgtataatttatcttttgtatccgccgcggcggatacaaaaggataccgttcccatcagagctagaggttttggtttcgtgagaagtttagagttaacctctaatgatttgagattttagacctctatcatactttctatgacacccagttcctttataagtaaccgttttacttcaaatatgcagtctttttttaacggtattccaaatacaaaaatgacatttgtaatttcatttattgcgtttttatactttattgttttaatttccaattggtcagatggatagcacaaaaaaccaaacttcaaatatctcttactgaatgaagtatatgccataatctgatgcaaatcatgtctataatcatctttaagagtctcactattactaaacttattatacaagtttgatttatatttagcatcaataaacaccattaaatcttccttctgataaatagcatccggctcgatatgttttagctcccaagaataatacttagacgttttagaatgaaatttaaaatttgaaaataatctaccacctgtttctttagcaacttctctgaaaatatattgaacaaatttttcaaaaacatcgcaaaaatcaactctccaagcagtacaatcaattaaattaaagttcaataccttattagcttgttctttacaagatttcacaattacattatcagatgttttaactgtaatattattcgttatttttggtttgtgataatataatttttcttcaatgaaattcaaccttgctctgattgtgtttttaatccttagaggagtatttgaagaaagcaactcacccttacaaatgtcaaatacataacgtacttctgcatactcactatgaaattcacttaatacattttttcgaataggaaactttaatcgtttttcaattttaaattcattgttgatgtacttattccaatttatttgtccatttggttgatttgatattttttcaacattatcaaatttacaccaagacttagataataaagcttcaagagaggcaatgaattttactgcttctaaatatagtggcggtcgaaaatttttacccgaagcaagaggtaagctatcaattacttccgggcttatttctccaccaagtaaattcaaaatttcgatataatcttcaaagcgatcactaccagtaaatctaggcattactacaaaatcacctatttgtttaccggtgtcagatgctcttagtggaatagttccaatgaagccagatgatcgaaaaactaaggagatattttggtcattaccaattatcaatggctgaatatctaaaaatttaaattgagctaaattatattctataaatttttgaagattctgaccgataattcttcgatcagccgatttaaaccattttttttgcaaataaactccgcttaactgtctggattgttcagttaagcaaggcatctcaaaaaaaacatctaacaacttactcattcaaaaagtgattgatttatacgtgaagtaaaataattattaaattcttctttagcatttctaaccaatccttcttgcaaatattcttttatcaacggaaatatttcatactgaattctacttttcatttcttcttcactttttgcaataaaataaccttgtccaggttgtaatgaaagttcattactagaagcgtaccaatcaaaaatttcattaattttcaagaaatcctcaaaaaagaaatattcagaattatttatttcaaaaacactcaaatttgacaaatttttctttttcccattaattggttttggttttaaatcataccaagcaaatcttcttctcaatgcaaaatcaactaccgacaaacttctatcggcagtattcatagttgagatcacatgaaaattatcaggtaatttattaattttaaagtccggagaaatttctatttcaacatcccatttgtccattttgtgttcaaacaaataaaaaataggtcctaaaacattagaaagatttgctctattaatcccataaatcttaaatatttaaaattaatagaagaatgcgttttgtatgccctaatttttaactcatcctttttatacaaatttaaagtattgttgttaaaattaaatttaaagataccttcctgatctactaaaacatataaattattctgattgtcaaaagaaatattcttgaaacctgaaaaaaaataactacggctagtagctaatgtagtgactttccatccatttacggtgttttcgattttacggattgaatttccaaggtagttattgtctcctctgtctattacatatattatattattccttattataatttgggatacgtctttaaaactggcatctgctccaataccatcttttacttcatctttcccggaacctgcaatcagtgtttctttgctcaataatggatttacttcttttatcgtaagtgaaccagtatcaaaaacaatataagaatcgttagtataattacaaatcgcatttaaaatgataggtttagaatttgtaactcccaaaggtttcattgtgtaataactagtaactgatttgtaattatttgtaaaattataaatcatattccctacttcatgatcattagttgttatcagaatttcgtttttttcattcttggtcaatctattataaaaaaaacgtaagtcgtgaaaagttttaagtacagctactttaccatttctatcaatcgtgtataaatttgccagtacggctcctcttccggcaatataaactatgttattgttatcgacaacgaaaccatcaatttcagtcggaatttcagaatctgttatatagtccgctattaattctccaggaatgttttgatcattttcattattactgcatgatgttaacactactaataaaatcattaaacgtattattttttctttcatttgtttaaactatttttttaagatgtaagatgagattattttttataaaaacttcgctttcaattccggagtaggaatcatacagctttcttttttaccataccaattgtatctgtttttagcaacataatcataaatacggtcgctgataaaaatgggaataatcctaaaaatttctgaaagcctccaaagaccaccaaattcttttgcaatagctattactgctgaagatttataaaagtaagcagagtcaggattcaataataaaatactgtccatttttgcaaaactaatccccaactgcttacaaatcgaaatccctaattctgattgcaaagctacaaatctgaaaatgtcatttttgtcatgcttgattataaattgtacggcagagttacagagattgcagatgccatcaaagagaactatttttttatttgcgggtaaatcaatcattttttaaacatgtactattttgaaggaacaattcctttatttgttttatctattgttgttttgttttcaatagtatttgaagattaaaaacggcttttataaaagatttttaagaggtttttaaaataaagtgatcttcttattgatttttaaagaattaatgctttaaatctctttattttgatttttaccaagaaaaacgccaattttactacttttttactgcttcaaccaactccagctcgtctaaacttactttcgaagtgaaaatgccataatttaccgttgctttatttttttctatcgcgtcaatacttccaacagatcttccgtcaagcattcttacacgatcaccaacttttagaattggttttggtttttcgactataggtttaagtttcttttcttttttctcctttcgaatttcttctactttaacagtgatttcggcaattacttcttttttcttttcaattattgctttcgtttcttttggagtaacttttttgcgttttgaattttcaatctcgactattttcaaaaattcaccaataagttcctttttgtttttattgttaaagtatttctctgaaatgtcttcgattttctgaccgatataaatggttttctgattactatcatacagttcctgataactttccagtttttgcttgatcttaacgttgatgttttccatctttttgctttcttcacgagccctggtttcttcctctttcagattaagagaagttttttcaagcttagaacgctccttttgaagggttgcaatcgttttatcaaaacgaactttgcctacttcaattttcttttttgcacgattaatcaatccaaaaggaattccgttttttaaagctacttcaaaagtaaatgaacttccagcctgacctaaagccagtttgtacataggttctaaagttttttcatcaaacatcatgttggcattggttgcgtatggcaattcattagccaaaatctttagattggaataatgagtggttataatcccaaaagcttcacgatgataaaattcttccaggaatatctctgccaaagcaccacctaattccggatcagaccctgtaccaaattcatcaattaagaacatagtcttcttgttgcattttttcaggaagtagttcatgttctttaatcggtagctataggtactcaggtgattttcaatagattgattatctccaatatctgttaaaatcctgtcaaacaaaaaggtttcgcttcgttcgtgaaccggaataagcatcccggattgcagcattaattgtaataaacctaccgtttttagcgaaattgttttaccacctgcattaggtcctgaaatcacaatgatacgattatcctgctttagctcaatggtttgcggatgagtaacttcatttttctgtttgttgttcagatataaaatcggatgatacgcttctctaaaaaacaaccttctttcttctgtaatagtaggcaaaattccgttgattcgatttgcatattttgcttttccggctacaacatcaatatcactcaaaaaatcctgatattcaattaataaaggcaagtacggacgaattgcatttgataattgcttcaaaattcgggtaatttcttccttctcttcgtattctaaattggctaattctctggagtattttaatgtagcttcaggttcgatataagcaatacttccggttttcgaacttcctaaaatagagcccttcacttttcgtcggtacatggctaaaacggccaaaactcttcggttttgcacaaaactttctttgatatcatcaagataaccaaggctattgtactgtgtaagagcgaccccgaaactttgatttactttaccgcgaaccaggttcataccctgacgaatactcagtaaagccggcgaagcattgtcttttatttcaccatatttgtctacaatcgcatcaatagtggtcacaatatcttttgtgtattcaacacgtgaagctctcgcatttaaatttggataataatcatcaaactttttaaggaaatttagtaaaaagttggaagtcgaagagagtgtagcaatttttctaaaacttcccacttcaagaaaactatcttcaattgccaaaaacttaatctcgtgagttatagcgtcaaatccgtgattgggaatggcgttattattttgaaaagaggaaacatattctgatgtttgcatcaaagcctgcatcaaagtttcctgatctctaaaaggtgttatttgtaaagctttttcttttcctatatcagtattacagccggctgaaatggtttcgagtaccgtaggaaattgtaaatcttgtaatgttttttcggttatagatatcattatatatcgtaagttgtaaaggttcaaagttacaaagttttgaaacgaaatagcactattaattagtactttgaagaaaactttgcttaatttgtgataaaatttaaaaaatggaaatcaatctttctcctgattgggaaacggtattaaaagatgaaaatcaaaaaacttatttttctgagctaatgaaaactttggaaattgaatatcaaacatatacttgttatccacctgcagaattgattttctccgcttttaatacctgtacttttcaaaacttaaaagttgtcatcataggacaagatccttatcatggagaaggagaggcgaatggattgagtttttctgtaaatgattccgttaaaattccaccgtcactgcgaaatatttacagagaactaaatgacgatctcgattcgatctttatgccaacttcgggcaatcttgaaaagtgggcaaaacaaggtgttttacttttaaatgcatccttgacggttcgcaaagacagcccaaatagtcataaacatttgaagtggaatttgtttacagacactgtaattcaagccatttcggatcaaaaagagaatgttgttttcctcttatggggaagctttgctcagaaaaaaggcgctaaaattgatcgttccaaacattgtgttttagaatccggacatccttcacctatgagtgctaatcagggaaaatggttcggaaacaaacattttagcaaaaccaatgattttttgaaatccaaagcaatcaaagaaatcgactggctgtagaaacggataactagttagaatcagtttttagcacaataaaaatgttgctgattactacaataacagacctattctttagtgtcttttttaatgatctcttccagaatagctttgttctcgtagttgattacctttaaaataatctcttgatttttagctgttttaccttcaatgatataaagttttcctttgcttacaggtacattgcttttgtcaaaatcaacatcaccaaatgtcagtgtacttttaatatctgcggtgtcaacccatttttcatttaaagtctgaattgctttttcggaatactgaaaaggcttagtgcgtaaattatttaaaactctggcgtttggaaagtagttgcaacgtgtatcttttccactgaacacaagggctacaaaaaagcatcccataaccaaaccaatcaaataatatgcaaaacgatgtacgaacttcatgaaatatattttttgcaaaggtacactaaagttcccttaaaatacaagtaaattaatatcgttgtccggtaaatcaaaccattccccaattgctttactggtcaggattccgtgatacatgtaaattccattttttaatcctttattgcatcgtatagcactttccaaaccgccgtcttccgcaatttgaagcaaataaggagtaaggatattgcttatggataatgaagctgttttagaatatctggaagggatattaggcacacaatagtgcagcacattgctttttataaaggttggtttttcatgagtggtaacttctgaagtttcaaaacagcctccggtgtcaatactcacatctacaattacagcaccttttttcatgtgttcgaccattgtttccgtaacaataataggacaacgctctttaccgcgcatggcaccaattgccacgtcacaacgtcttaaagcttttagtagtgctttttgctgaacagttgaagtaaaaatacgttggttaagactgttctgtaaacgacgtaatttggtaattgaattgtcaaaaactttcacatttgcccccagtcctatggccgtttttgcagcaaactcaccaacggttccagcacccagaataacaacatcagtaggagggactccagtgatattaccaaacaagagaccttttccaaactcgtccgtaatcattaattcggctgcgataagaatagaagctgttcctgcaatctcacttagtgatttcacagcaggataggagccatcttcgtcttttatgtactcaaaagccagtgccgttatttttttctgtgctaaagcttcaaagtatgccttcttcttagtttttaattgaatggccgaaattatgatagtttccggattgatcatttcaatctcggctgttgtaggaggttctaccttaagaagcattggacagccaaacactttctttgtatcatttgttacttcagctcctgcatcagagtactctttatcactataactggagctttctccggctcctgattcaatcattaccctatgcccctcataggtcaacgcactaacagcatccggagtcagacaaatacgacgttcctgataacttgtttctttaggaattcctataaaaagctcacttttgaatcggccaatttcaagtttttcttcttgtggcaacaattgctgtttcgtaaatggggttaaggtaattgacatgggttgtgcaaaaaattaagagtacaaattacgtaaaaagttttaaaatcaatgtaaaaattctgctaatagttgtttaagaattataacagaattttttccatttttatatcagctctttcgtaactcacgtcacccaaaggaacttcactaaaaccaaatttctcatataaaagaagtgcaggaagcagtatgcgattggaatacaaaaacagctttttaatatggttctcttttgcaacagtcatgcaatgtgttaacagtttgtttccaactccaaggccttgtgcttgatccgaaacagccattttactcaattcaaaggtaatgtgatcaactttcattaaggaaacagttccgataatttcaccgttatatctggcatagaagattaatccgcctttatcgataatttcttcttgtgggttagaaagtaccaactcgtctttttcttctactttaaaatactttttaagccattccagatttagaatcttaatgtgttcttttaaatcagttgaaaaagagataatttctacggtattttgggtattcatttttattttcttagtgtctttatgtagacctttcgccttttgttgaaagttttaggataattttaattctctttttccatctgccagcagttcaattgtgatggttgaagtttcttccggcagtaagcttgcaattttctcagaccattcaataaaacaccaatttccggaatacaagtaatcgtcaactcccatgtctagtgcttccgtttctttgtttaatctataaaaatcaaagtggtaaacaatttgattgttagaagtataatattcattaaccaaagagaaggttggactactggttgcatcctgaactcccaggtttttacacaattgtttgattaaggtagtttttccaacacccatttctccattgaaaagaatgattttttttggatttgcggctaaaatttgcgtggctacttctctgatttgatctaatgaaaaaacgatattcatttttttatttgttttaattagtctcagttttcatttttcagtctcagctctaaactgagaccgaaaaatgcgactgagaactttttctatttagggttaaataccaaaaacggaataatcatttcttctaacgaaatccctccgtgctggtaagtgtttttataataactcacatagtggttgtagttgtttacataggctaaaaagtaatcgtttttagcaaaaataaacgaactactcatgttaatcgctggcaaaccaatggctttaggctctttaacaacatacacatctttttgttcgtatgttaaactacgaccggttttgtagcgcaaatttaaacttgtatttttatctccaaccactttcgacggattttttacattaatagtaccgtgatctgttgtcaaaatcaatttaaaacctaaaagttgtgcctgttgaataatttcgagcagtggcgagttcttaaaccagcttaaagtgagtgagcgataggctttgtcatctgaagccagttcttttaccacttccatttcagttttggcgtgcgaaagcatgtcaacaaaattataaactacagttacaagatcatttccttttaaagctttgaaattttctgccaatttttttcctcctgcgtaattggtgattttgaaataatcttctttaatatttaaacctaagcgttttaattgcgctgatagaaattcggcttcaaaaaggttttttccaccatcttcaacatcgttcttccaatattgcggaaactgtttttccatctctatcggtaataaacctgaaaagattgcattacgggcatattgtgtggcggttggaagaatagaaaaataaggaacctctttttccagtttataataattagaaaccaccgtttcaaaagatttccattgatcataacgcaggttgtcaattaccacaaataaaataggtttatccttctttttaagctccggaactactaattctttgaataaattgtgcgattgaacaggcttgtccgcctttggagcaaaccagtcttcataatttctctcgatatattttccgaattgcgaattggcttctactttctgagactccagaatttctatcattgcctgatcgttaatattctccagttccaactcccaaaagattaatttcttgtatagttcaatccaatcttcaaaagaattaaccatagccaattccatggagatttttctaaactccttttgataatccaatgtcgttttttcagaaattaatctcgaatgatctagatttttctttagacttaacagaatctgattcggattcaccggttttatgagataatcggcaattttggaaccaatagcttcttccatgatatactcttcctcgcttttggtaatcataatcatcggaatagctgattttttctctttcatttccgaaagcgtttccagaccactcattccgggcatattttcatctaaaaaaacaatatcaaaattatcttcttcaaatagtgtaatcgcatctaaaccattgttagaggtggttacaacgtagttttttttctccagaaataatatatgtggtttcaaaagatcgatttcatcatcgacccaaagtatttttatcttgtccataaacgattttaatttttaatgcaatttataagtatagaacttaaaaagtattaaaaatggtgtcatatctaattcttagattacaaatttctaattttattttgacattcctccccaggttttgctcttgatcctgtttaactacgaaggaaaaatggtaaaaacaaaaaacccactcggttgagtgggttttggtggtacctccagggatcgaaccagggacacatggattttcagtccattgctctaccatctgagctaaggtaccgtgctgtgcgcattgcgggtgcaaagatagaatcatttttcgtttatccaaaacatttttttaaaaaaatcaattcgtatcttcgccttgctaaaaaaacaaacatgattttaacggttgatgttgggaatacccgaattaaagctgctgtatttgagggtggtactgttcttgaaatttttacttttgagaaaaatgagctcgaaaaaaaaataaaaaaaattttagaaaaatttcagaaatgctccgatttggttgttgcatcggttggaaatgtcgaaaaacaatcttttctgactttcgaaaaggatctaaaagttcattttttaacccatgaggatatttttcctttcaccaatagatatgcaactccaaaaacattaggaatagaccgaatggttttggcggccggagcaactttgaaatttcccagacaaaacagactggtaattgatgccggaacttgtataacctacgatttcatcgacgaaaatgataactatttagggggagctatttctccgggactaagactgcgttacgaatctttgcacaattttacagccaggctgccgttactcactttagagtctccggaggcatatattggagattctacaaaacaggcgattcactctggagtggtcaatggattcgtctatgagattgatggttttatcgatgaatatcgggcaaacttttcaaattttataataattttaacgggaggtgatgcagattttttggctaaacgattaaaaaataccatatttgccaattcaaatttccttttggagagtttgaaccaaacatttcaatataaaatcgacaatgattaaaaaaattatagtaagcgcttgtttgcttatctcgttcgtttcattcgctcaacagggtactgcatcgccttattctttcttcggaattggagatacaagatttaaaggaacccttgaaaacagatcgatgtcaggagttgcggtggagcaggatagtattcacctgaatattgaaaatcctgcaagttatgcgagtttaaagtttacaacttttacagttgggggatcttttggtacaactaatctgaaaaccggcgaaaaatctgaaaaggcacaaagagctacttttgattatttggcattaggaattccaatgggaaaatttggagcagcgtttggtttagttccgttgagttctgttggatataaaattcaaaatgaccttacagatacagaaggagctacaagtacacagcttcagggaaaaggtggagttaataaagtgttttttggtttaggatataagattaaaaagaactggaatattggagttgatgcacagtataatttcggaagaatcaccaccacaagtttagcacttagaacaaatgttgaaaacgcgaccagagagacaaatgcttctgagttatcgggtattaattttaatattggtaccatgtatcaaacaaaaattgataaaaaactaagcttgtttaccagtttgaattatacttttgccagtaacttaaattcaaacagcacaagagttattcaggtagatggtgatccggatccaattaatactcctgagcaaacaaataaactaaagttaccaaataaaataacctttggtgcgggtatcggggaagccagaaaatggctggtgggtacgacgatttcttttcagggcaagggagagcttgctaatttttacaatacaagagataatgtacgttacgaaaaatatcaaaagtatgcgataggggggtactatattcctaattatgaatcgttcacaagctattttagccgaatgacgtacagagccgggttaaaatacgagaaaattggtttagtagtaaataatcaggaaatcaatgatttaggaatgacgttgggtatggggattccacttaataacggatctttttcaaatgttaatattggacttgagttcgggaaaagaggaacaatgtcagcagggttagttcaggaaaactatttcaattttagtatgagcttctcatttaatgataaatggttcgtgaaaagtaaattcaattaaacataaacttttatgtttttttaagctcattacaatttactacatttggcaaatgaatttatcaaaaagatatacaatagcggctgtcacagtttttactgtgacactgttttttgggtgcgaaagtaattttaaagaagttcagaaaattaacttctcagagtttgttcccggaagtgatgcagataccgttgatattaaatatacagattccgggcgtataaccggggttttgaaaagtcctaaaatgctggattattctaatttggattttccatttaccgaatttccaaaaggaattgatgttaccttatacgataaaaatcaaaaacgtacctttatcaggtcaaattatgcagtgtcttataaaccaaccggtataattgacttgcagggaaaagttagaatcacttctgaagaagggcaaatgctggaaacagaacagctgtacttcgatcagaataacgaatggttttataccgaaagaaaatttaagcttacagatgcaaaaggaagctcaaatgggcaagggatagattttagtaaggattttaaagtgattaattcgcagcgtgtgagcggcgagatcgaatcagacgaataaaaaaagaaattatgggttacataaaatatacacaatacgtttacatcatatttgccatttactttatttatgatggttttacaaagataaacgatggaaatgataccgccgctttaagttttttaattgcaggtatggcagtatttatgttcttctttaggaggaaatttgtcaagaaatttgatgaccgtaataaaaagcaataaacaatggaaatagggattatagtattatgtttaatattgtcagcctttttttcaggaatggaaattgcttttatttcatccaataaaatttatcttgaaattgaaaaaaaacaagataattttgcctcacaaattctaacaaaacttaccggaaatccttcaaagtttattgctgcaatgcttattggtaataacctggctttggttgtctatggcttttacatgggagatttgattctgaaatggatcgtcaattcagcagggcatttttcaaatttaacaagtttgctgattcagacggttatttcgacttttgtagttttggtaactgctgagttttttccaaaagttttttttcagatttatgccaattcgttaatcaagatttttgcgattccggcctatttgttttatcgtttgttctactatttctctactttttttatttggatttcagattttattctgcgtaaattttttaaaacagaaggagatcaggcacagttgtattttagcaaagttgaattggggaattatattgcagaacaaatgaatgctgttgaggatgatgaagaagtagattctgaaattcagatttttcagaatgcattggaattttcaggtgtaaaagcccgtgatatcatgacgccgcgcaccgaaattgttgatattgatttgtttgacaacgttgcagatcttaaagcgttatttatagaaactggatattcgaaacttatagtgagtcaaaattcacttgatgatattgtagggtatgtgcattcgtttgatttgtttaaaaaaccaaaaacaataaaatcggttttgatgacggttgaatttgttcccgaaaccattttgataaaagatgtactaaatctgttgatcaaaaaacgaaaaaatgtggccgtagttctggatgaatacggaggaacttccggaattattacaatagaagatatcgttgaagagctttttggtgagatcgaagacgagcatgatttagatgaggaattgattgagcaggaattaggagaaggcaggtatttgttctcgacccgattagatgtagaatatctcaatgaaacctataaattagcgattcctgaggaggattcgtacgggactttaggtggttttattgtcaattcgaccaaagaaattcctcaaaaaggagaagaaatacgaattggaaactatcattttatgattgaagaagccaaaaataagaaaatagaattggttaaattgacaataaaagagtgattttttaaattaataaaaaaaattgtgtaaaataaaacgctagttgtattgttattaactagataattgtattttcgcaaactgaatataaaattaacgataataaaaatggcagttttagcaaaaattagacagcgttccgctttattgataggagttattgcacttgcattatttgcatttataatacaagatctattcacaagaggaacctttggtcaaagttcaaaagatgtgggaagcatcgatggaaaagatatttcatttgaagactttagagttaaagttagtaatgttgaaaaaagtggtcaaggaattacttccactgaagctgcaaacagagtttgggaccaggaggtttcaatcgcattattatcaacacagtttgataaattaggattgagagttggtgaaaaacacctgcttgaagttttaaaggcagatccgaatattggtaaaaacccaatgttcttaaatgctgccggtatttttgatgtagctaaatttaaagaatactttaaaacgaatcctgaagcagcacaatttatctctcaaaaagaaaaagatgctgagctaaacgctaaatttcaaatctacaatacattagtaaaatccggactttacactacggtaagtgaaggaaaactaaaatatgaaatggaagctaacaaagtaaactttgcttacgctgctgctttgtattcttcaattaaagatagtgaagtgaaaatttctgattcagagattgtagaatatatgaagaaaaacgagaagaaattcaaagcggatgcaactcgtgaaattcaatacgttttagtagaagataaagcttcaaaacaagacgaagctgaaattaaagctaaaattactgcattattaaacggaagagtagagtacaatgctaaaacaggtaaaaacgatactttgccaggatttaaaaatgctactaacattgctgaatttgtaaactcaaattctgatgttccttacgattcaacgtatgtacctaaaaatgctttgccggctgttgatgctgataaattattcagcttgcctgcaggagcaatttacggaccgtatgtgtacggaagatactatgcaatttctaaatctttaggatttaaagcaggagttaatgcaaaagcaagtcatattttaattggatacgaaggttctcaaactccaaatacaaaagagaaaagaacgaaagaagaagctaaagctaaagcagaagaaattctggctcaggttcaggcaaaccctgatagtttcatgatgttggctttcacaagttcagatgattcttctgcacaacaaggaggagatttaggatattttggaccaaaccaaatggtgaaaccattcaatgattttgtattcagtaacggaattggaaaagttggtttagttgaaactccttttggatttcacgtaatcaaaattaccgacaaacaagacggaattcgtttagctactatcgctcaaaaaattgagccttctgaagctacttctgataaagtatttacattggcaactaaatttgaaatggacgctgccgataaagattttaatgctacggcaaaagaattaggtttaaaagtggctgctccgataactgcaaaagctatggacgaagcatttggtccattaggaaatcaacgtaacatcatcagatgggcatttgataaggaaacgaacaccggagatgtaaaacgttttgaattggcaaatatcggtcacgtaattgcacaatacaaaagcgaaaacaaatcaggtttagtatctgtaactttggcaagaccttatgtggagtcaattttgaaaaacaagaaaaaagcggagatcttaaaagcaaaaatgaaaggttcatcacttgaagctattgcgaagagtgctggtgtagccgttcaacaagcggctaacgtaactatggatagcccggtattgcctggaggtgttgggcaagagccaaaagtggtaggtaatgcatttgcattagctgcaaacaaaatctctgctccaattgaaggtaatacaggtgtatatgtagtgaaaaatatcagtacagtaaaagctcctgcagctgctaatcacgcagaatatgttgctaaagtaaaagcacaaagcgcatctgatgcaagtagaattttaccggcattgaaagccaacgctaaaattgaagataatagattacaatttaactactagtttttagttagttaaaagtttataaaaaacctgctcgttagttcgagcaggtttttttttatgaaatttccaaattcagtatagtatttttcttatatttataaaaatatatttgtatgaaaaatactaaaaaattagcaatcctcctaatggttttaggagttgcagtgttaacaggtcgttgtgctttagaagaggtaggagggaaacaaaaaatagagcagtctattacggttaatgaagcgaaggtttggtttgaacagtatcaatcaaaagtaaaaatcgattcgtcgtttaaaaatcagatttataagtgggatagtgcaaccacagaaactttcgaaaatgggtctgaggcgattgtggttactgttaaagataataatcttagcgatgcctataaaggacaacaactattgtatttgtatccatcagaggataaaaaagaattttcggctacattatatgaaataataccgtcatcggaatctttagaaaaaataaaaagttcacaggatttagttaactttaatggatatatcattgcctgggatttagaaagcggatttgtaaacggagcaaaatttgaaaactccaatacgacagcagggttaacaggacttagagtaatctctccggaggaggcagagcgtctgaataaatcgacagcaaaatcagatcctattgaattagatgaagtgatcattcgcagggaaaaatccgaaaataaacaggattatggagggggtggaagtgcaggaggttcttatggaggcagtttaaactcaggatcgaagggaaatagtccgaaaggatatgtgaaatctccgggaggtggaggaagtggaagttcaggttcgacaacttcggaaaatgcacaaaggatagaagagcaaattagtgcagacaaactggatgcctgtaccaaagcagttttggaaaaattgaaaaatttaaaacaggccgatattgcaaaaatgattactcgttttagtgcgacgggatctgtttttaatataaatatgtcaacgggacaagtacaaaatgataatgcaaatgtatgggcacaaaccactaaggccaacgggagtactaacgatgttaatatggtttttaatcaggattatatttacggaacaggtaatacaaatcctcctaccgatttgtcggttgccgctacaatggcgcatgaggttatacatgcttatctgattagtctattgaatgaaaataaaactttaggagcttcaataatttatgactttccaactatctatgaagcttatgtaaaacaagaaatcacaagaaataccaatgtactcccagccgcgcaacacgagttaattgctattagatatgtgaacacgatcgcttcgaccatacaagagtttcacacaggaactcctgttgtttcttcagttcttattaaacaggtatatctcgacatggcttggggaggacttcaaggaacacaaatatttaataagaattatcctagtgatactaacgataaaaattttaaagaccgggaaagaatttttgctagaattaatgccgaaaaattgggttctcaatatggtataaactctcctatagggataccttgtaaaaagtaaaatgatgaaacaattaaaaatattacttgcaattatttctttttttattttatcatgtaccagtgttcaatatgtagataactatgagtcaatcaatgtatttcttgagacacaaaaacttagtaaagagaaaaagtatattttacaaagagataaggggcttaataggtgggctctgagaatcttcaatggaggtgtggggcttgatcatataatagatccaagagattctttagattatacagatgggctttttgtaaagaagcattgggaaaaaatgtataaaagatatgtcaatgatactctaaaaaaatattggaaaaaggaagattttcctgagtacaaattcatacttgaagatgaaaagggattatttaagcatgattttttagttagatattatggtacaggattgcatgaggcaataataatttcagatccaatgtattatcgaaataaaaaatacataatgttttattatgctaaggtatattctacgggaggaggagattactttactgttgttatgaaaaaagaaaagaagaaatggattgtagttaaagtgattggcgattatgtttattactagtttatagtttaaatattgaatttaaaactagtttttcttcagtttcttcactcttcactcttcactcttcactcttcactcttcactcttcactcttcactcttcactcttcactcttcactcttcactcttcactcttcactcttcactcttcactcttcactcttcactcatcactcttttacatcttccccttcctattcaatacttccaacttttgatctaaatatttcacaaactcttcttttgatttaattccgtttggctcttgttcccaggcgcctaaaaagtaaaaagaagttgcttttgtagtaggcttaaatactaaaagataatctaaatctgtatcaggagtattttcgatggtattaatttgataaaaaatggccattcctaatttgtccggaactaatgactgctggccatacgtagccagataagcccattttttatttttgctttcttttttaagaagctccgtatttttctgctttacaattccggtacagattccttttatttctttggatgcctgaatggtatgctgtgtgtacagttcatttggtttaatggtcaaaactgaggtaaaatcaattttatccgaagccgttttccatccataatattgcacttttacacccgattcattggttttatttactactgtagcaatagttgaatctacttcatagaaatgcaatttttcattgtttaagtagcggtctatggatcctatcccgattccttttcctgcttttagaatatcggctccccaatcgctcatctcgtgatacgaatcaaaattatcctgacctacttttggcaaaacaatttctgatgtttttttaccgaaaatatcaatcgcatttcgccagtctaaatacaaacgatatccaattcgattgctttcccagcccggtccttcgtaacgaatgtcaaaagaatggtctgtatgctccggtgccagtttcaatctgtctacatttttaaatacagttcctccaatatatttacgggcttcccattttccgtctgttttagcagaaatttcggcatacgttttggcggtttttatatcatatttctgtgccttaaccgctgtaataccgactaaaagtaaggttgctattgtgatttttgttttcattttttactgtaattgtttaaatattctgtctaaaaattgtgttgtatattgaaccgtttcctcaaaccatggctgaaaaaaccaaaaggaatggggtgaatcttttattgttctgacctcattatagatcttattttggtttaaaattgcaatcatatcctctctacctgcatgaaaccgatcaaaactgctgttgatgaacagtgttggcggagtgtttttatcggtatggcttaacgccgatgccttttcccagttgtcccgtttttcctgataagtaccgtttaaccaaaaagcagccatttctccttcttccgattccggatgtttaaatgctaaaattccatctacattaattattgcgttcacttttgctgagaatctactcttgttcgcaggatcttcaaaagcagaatttttatttgttgtaccaatcaaggctgccatctgacctcctgaagagcatccaagtacggcaattttgtttggatctacatgaaattctttcgcattctcttttataaacttaatggcattttttacatcataaactgcctgcggatattttgcttcaggcgataattggtattctatggcaaaacaggaatatccttttgaactgatttcctgccccaaaacctgcagctgatttttattccccgatttccagcctcccccgtgaatcaaaattactcccggatttgtgttttcagttttgttccaataggcgtcgagatgtaatgctctgttttgactcttatgatagattatattctccatttgaatcacatttgccctgtttttcgctactgctatttttataaacggatatttcttaatcaatttagtatatgtactatttacggtataagaagtatctgcagtattatgattctgcgccagaactatattcgaaaagagccacaaaacaatccctattcttttcatttttacttatctgatttattcgttaagaaaggagcctgattcaggatcaggcccctttataacttcctcaaaaaaacgtaacctcaaaatttttaaaaccactaatcataaaaacctttttaataagccgggttttgagggtaatttttacttctgttcaaatctaatgctgactgtggtataggtcttagaattttaagattaccattctgtccgttaaatacgttggcattggtgattttaggattgtataaaacagctctttgtaccaatgtaccggtacgtttcaaatcgaaccaacggtggtattctcctaatagttctctacctctctcgtctaatatggtgttgatatcaatagtcgtcattaccggaattgctcctacaactcctcctcctgctcttcttcttacttcattcaaacgtgttagagctgtcgctggctgacctgctttaaagtaagcttcggcggcaaccagataggtttctcccagccttgctacaataaaatcacgggtactgcttctgtttgttgccggtgtgataggtgttgagttatagtttgcactggtggcaccgctgtatggtgcatttggatcgtcgaatttacgaaccggaatcaggttgtaatcaccacctgaagcggcagccgaagaataagttccccaattgtgatatctgaaagttgctgcattggcttttcttgaagcattagcggtattccaggccgctctgtcggctaaagtaaaccagcgtggctcgtaaaaatctgtaattttcaaagctgttttatccgttacggtataaaaatcgtagtatcggctgtagatttcggtcatgaaggtgttttcccaacgtttatcaccctgctcatacaatgataatgcgtaagctgtaggacaaagtgtgtaacttctgtttggatatgggttacctgctgccgctgcgcctaagtacgagctaaaccaataattttgtgaacttcccaaagctgttactcctgtagcatttgaagctactgaaaactgaacggagaaaatggtttcggcgttcatctcgttccccggttttaccacatctgcaaaagatacattaagtgcttgtccggcaattacctgatctgctaaagaagctgcggtagtaaaatctgccggtgttccaaaagtttcgtaacctttagtcaaatatacttttgctaataaatcctgaacggctcttttattcactcttcctgtataagcccccgtacccactgccggaagcgcttcgttaaggtcttttaaaatttgtgtgtatacttcttctgctgaatttctatcgaaagaggtaacagcagtattaatgttctctagtacaatcggaacacctccgtaagtctgaaccaaaaggaaataagcatttgctcttaaaaatttcagttcccctactcttgtatctatcgtacttgctttttcggtaagggttgaataatacaatcctttgttggcttgctgaatggccatgtaacaggttctgtacaataaatctactccggctgacgaagaagaaagggttaaatatttagccaatccttccggttcctgatttcttccttcagagtacatatcggtacctgcttcaaacagccacggatcaccaccgtatatatcttttagagtggcgtaattggtgttgaccaatgactcaaacccgggagcagtaaggaaatattgttctgccgagccaaaggcacggttgtcttcttcgataaaattggagcacgaattgaatgtcgtcgccagtattgctataactactactatttttttcatttttcttaatttaaaattttaaacttaatcccatctgaacagtccttgttgcaacacgattcactgctaatgctgcagttgcccattcagggtcatatccttcgtaattggtaaatacaaaaggattcaacacattcacataaagtcttaaacttttaattttcaatttgctcactaaatcctgatcaaaactatacccaaaagcgatgttttgaattttcacaaatgaagcgtctttgtaaaatgctacgttattagtatcataataaacccctgctccacgtggtaacggatttgtattggaatactgagccgccagacctgccccattagccggaatataccagtctccaagatctaatttttgacgtcctctatcggtaacatctgcaaagttgtcgtggaatccgctaaaaacagtcattccctgattggtgattaacgacattgacaaatcaaattgttttactttcaaagtagtagagaaacttccggaccatttaggatcgtagtttcctaaaatagctctgtcgttattggcgtcaatttttccatcgttattcaaatcttttacttttgcttctcccggtttctgaccgtaagaaagggcttgcgccgcttcactttcctgccaaactccatcaaaaacatagttgtagtacgaatggacattttctccgataaataaattatttccaacatcacttacctgatcctgaccataaatagactccagtttgtttacgtttttagtaaaagtgaagctcgtctcccaggtaacatttttagtctgaatgtttttagtaaccagcgccacctcaatacctttgtttctgatagaacctacattagaagtaatagttgggactccgatttctaacggaagggcttgttgaaacaataaatctttagacaaacgattgtaaacgtctacactacctgaaattctattgtgaacaaatccgaaatccaaacctaaattcacctcttttgttttctcccaggtcagattcgtgtttcctaaacttgaagcggtaaacccattggcaatggtaccattgtaatcatagtaagcaggatttttcaaaacacttaaactggaatacggacttacgttatcgtttcctgtataaccaatacttcctcttaatttaaaattagaaacgaaatctaattttttcataaatccttcttcatgaacattccatcctaaagctacagaagggaaagcagtccatttattattttcagccaaaacagatgatccgtcataacgcaccgaagcagttagcaagtaacgtccctgataggcataattgaaacgggcagcatacgattctaaagtgtttttagagtacggactgaacacgcctgaaggaattaaggcaatagtaccgcttgatggtgtcaaggagtaagtcgactgaactcctgaacctaaattgtaaaaactggtttcaaaagggttttctcttgacgctgcaaagtacgtttcggtagtattagaatagaaactctgaagacctaaaaagctaaaaacatggtctttattcaacgtgtaattgatgttaaactgattgtcccacgtataattaaaattgttcacattggttacgtcaccggatggtaaacttttatttttaagaccaaaatcagtttgtgcgccaaatgatcttccttctctcgcgtccatttttcctgctgaaaaagtagaacgaaacgatagccagctgttgattttatactctccgaagatattcccaagggtagtaaatctttctatttcgtctgttgaatttgcaatttctaaaagcggattgtacgaacctgttttgttaatcgctaaatttccgttaggatatctcaatgtacccggctgttgtgcataagttccaacaatttcattaccggctgcatctattgcccaaggcgaagtatatggattttgtctgaaagcttcctgcatggctgttgggctccctagctgttcagaggttttagaaatagtaagattaactccaaatgaaattttgtcgtttattttatgattcaaacctgctttaaaattgtatttatcaattccttcattgtcaattactcccgtttctttctgagctccaagaccaatgttgtaggacagtccgttatcggcacgaccggaaacatttaagtaattgttttgcatcattcctcctttaagaactgcatcctgccagttgtagctttgattcttagccactctctgaaataacacagggtttgtaccagcctgtcccacagcagcattcaattctgaagcatcaatatcgttataggttggattggttgctgaaatagtagttgccaaaaatgccgattggtgataataccaccatttttcaggactcattaattttggtaatcttactgcctctttgttaccgtaagagctgtcaaaagtaacggtaacgccagacttagcacttgttccacttttggtcgttacaataataaccccgcttcctcctctggaaccatagatggcagcagaagaggcatctttcaatacgtccattctcgcgatatcctgcggattcaggaagtcaatattatctgttggtacgccatccacgacaaaaagaggtttagaaccgtctttattgattgagtttgttcctctgatcacaacgttaaaaccgtcaccaatacggccgctgtttgaagttacctgaactcccgcaatacctccctgaatggcttccatcggattggtaacgtttctttcggtgattttagctgccgacaaagtattgactgctcctgtaaggtctgttttctttgcggtaccgtatcctacaaccactacttcatttagcgaattggattgttccgccaggctcacattcactttcgattttcctgcaatgcttacttcttgtgtctgaaagcctaaataactcacaattaaaatcgctttattattagtcacattcaatttaaaacttccttcaaaatctgtagaggttccgtttttagttcccttttcctgaatgtttacaccaggtaatgataatcccgcagcatctgtaattttcccctccactatagtcgattgcgcataagttgcactgctcaacaaaaaattcaggaaaaataaaaatacaagactgtattttatttttttctttaatagttctttggtattcatagttttttaaaatggtttggttaattgatagtttttaattcgtaagttattctacttttttttcattgatataggtattaataaattgtatgttctttacatttttaagcaaatgtgctgaatctactttttgaatgactacatttttaagggtaatattttctaccggagattgctcatagccttctgcccatactccatatttccctccatttttgacgtttatattttccaggctaatatttctgatggttggaataaaattgccagtttgtgaaccgtaaacattataaaacatatttaattttaaaacacattctttcacagtacctacttcaaggtttcgaacgaatacattttcaatgaccccgcctctttttgaattggtcttgattcggatggcacgatccaaatttggactgtccatgacgcagtcttctacaaaaacggtattgacacccgccgatatttcacttccaataactactccgccatgaccgtcaatcattttacagttctgaacgataatatttttacttggaattgctactcgtcgtccatcgccatcgcgacctgctttgatcgcgatacaatcgtcaccagtattaaaggtacaattcttaataagtacattttgcgaatattcaggatcacaaccgtcattattaggaccatgactgtttacggtaactccgtcaatgataatgtcgtttgattttaaaggatgtaaaatccaaaagggagcatttataatggtaacatctttaaccaaaacggtactgcattcaaaaaactccataaaattaggtctcagatagcgtccctcaccaaaaattctttcttttaccggaactcccttttcggccatatcgatcaaaacggcacgattttgaggatcattttgcgaagggattccttttttccagccgtaatctttaccaccggaccaaatccaccagttcgtagcatctgcctgtccgtttagagttccttttccggtaatggctatattggttttgtttttggcgtaaataagcggcgaataattcatcagttctgttccttcaaaggaggtatgaactataggatactcttttggatcgatgctaaaaaggacttccgcatgatcatccaaatgcaggtttacattattctctaaatgtatggcgcctgttacatattttccatcaggaatcaacacttttcctccgccattttgagcacatgcttttattgctttttcaaaggccagtgtgtttaatgtctttccatcagcgactgctccaaaatcattaacattataggtcttatctaaaaaacgggttttagagatactttttacaattaggtctttgtttttccagggatcagcttcagaaaaagttaaagcctgctttccacaagacagcatcgtgaaagctgttgtagctgccattaaaactgatttaaacattctaactttccctgtaatcatgttattctattttaggattgatttacaaaacagtgtaattatgtaatcgattacacgaaagtagaaaaatagttttaatgcaccaaatttatttgattaataaaaacaagtttattcttacattattaatttaagaataagtaaatatgaaaagtgagaatagcagttatcctttagaatggatcgaaaaaatagatcgtcaaattatcttttctatcaacaatggcttaccgggaactgtttttacagccattaaaaatgaagagagaatttttcaaaaaagttatggcaatcaaagaatatacaacgaaaaagaattgatgccaaatcctcaaccaatgaaagtggatacaatatttgatatggcatcactaactaaaattttttcgaccacattttcttatatgaaattaatagatgatcgtatattgtctatagaagataaagtgaacaagtatcttcctgagttcacaggaggtgataaggatcagattactataaaacaagttttacatcataattcaggtttgccgtcaagttttcatttttatgatccggattatgatcccgatttttattctcaatctcgagagagaacgattgaattgttaccattggttcctttattaaataaacccggtacagtaacattgtatagtgatattgggtttgctttgctggggattataatagaaaaagtcaccggaatgagacaagatgagtttgttaaaaaacagatatatcagcctttaggactgaagaataccgggtacattctggatagtacaggtcttgtgcaagatcgatttgaagcaacagaaagatgtggaaacacaagagatggtatggtttcatttccaaatatcagaactaaaactattcagggagaagttcacgatgaatttgcttattattctatgggacaagtatccgggcatgcgggattattttctactgccgatgatctttctgttttgtgtcagttgattctgaatggaggaaagtatggtgcttttgaactgtgctcacaacaaactgtagatttatttcttaatactttaaatatagataaaacttatgcattaggatttcaagttcctactgatttgtgccatcttatctatggtttattacttcctcaagccggtcatgcatttggtcataccggatgggtaggaaattgttttgtaattgactttcatcacaattcaattgtaataattctcacaaacaaaaaacatacacctgtaattccaactgcttatcgggataggtttgaaggcgatttactgcctgtcgcaggttatggaggaacaatacagcttttctatggaggactcgtttctgaaactgtcaagaactaaaaaaaacgggatatctgtcatagaagagtatagaaggagttttttctttttgcaagtttagatgttttttgaggaataaatgatcagaagttatctaaggtataaagtagaacaggtgaaattgattattgggattattcttggtttaagtttaactcatctcgtaaaagagctcattagttttataccgtttcctgagaaaagagaagcctgcttgtacattgtattttatcgattatttttttacaaataaagttctccgcgcatcgttatggtagaggaacctccaaccagaatatcttcttcacgattcattacttcaatcattgagggctgttttaatcgtacaccctgaagtattttgtattctttgtcggatttagtgaatttcttttgtgttaaaaagccaattaaaggtcctgcggctgttcctgtagcaggatcttcatttattccgataattgggttgaaaaatctcgtttcgacgatatgctcctcattttcatcagcgatggtgaaacaataaaaaccttcgaatttatattctttcgaaatttcgattaaaagctggttgtccggaacaaaactattgagtatctgactgctttttatgggaaccatggcatgggcaacttctgtattgactatggtaggaacaaaagcatttacatctaaatcttcaatttttaaaccaagtgcaactgcaattttataagttggaatttcttgcttaatgactgccgatttttgatgcatttgaacaagaggatagaaagtaaccggatctaaagtaacggttaacggaatggcggaatgtttcatgattacaaaaagctcactttcgttttgctcatcaaaaataggcattccttttaagagagcaccgcagactgcacccagtaaattatgtcctgctccgtcgatctcgattcctgttggggtaaacgaacgaaccatcagtgctttttctcttgtggaataataaacaaaagaggtttcggagtaaccaaattctttagagatatcctgatatgtttccagttttaaattaccatcggtaaaaacaacagaaagcggatttcctttataactttcgtttgagaatacatctaaaacgtaatattctagtgtttttcttccctccattttttatttctttttagctgagatttttttagacggattaaagttaatatttatcatttagcaaagcaatagttgttacaacattcgtttttgttcggcacttatctgtattgctttttctaatcttgaaagtctggttttttcttgtttggcactcatgatccagtgaatcattacttttctgtacgagggtgcctgatgactaaagtattcccaggctgttttgttagctttaaattgtttttcaaattccgggtcaagtaggtaagcttctctttcatgtgagtagattttagatctttcttcagatcttaattcgaaagcctttaagccttcggggagcatgagtccggccttagtgagttcttctacttttttgatattgatggcactccagatactggatttttttctgggtgtgaaacgtatcgtataactttctccatcgacagctcttcgaacgccatcgatccagccaaaacaaagcgcctgatcaacagattctgaccaggtcatgcacggttttttggtactcactttataaaaaccaactaaaagttcggtttctttttgatagtgtttttctaaccatgctctgaatttttcgggtgttgagaagaaggttggtgtcattattcagttttagtttttaatggaggtgggggtggtgggggaagaattgtacttaaatcgccaaagtcaatgacctgttttgttggaataaattttaaatgatctttaaacttggataaagagttaataaaattataaagctctttaggagcagtatgtccgtatacaaatatcgatttgtttttattattatttgaaatgttaagcagataggcgctgccatcacacaaattattctgtgaatattcacctttaaatttattgatgtttaaactttgaagatgcttgtatagtttttcttttatattaccattaattatggcatagaaattttcttttggttcgggatatcttctttgaagaaaaatagtatcgctattattgaacttaattgaattatcatgatgtaaaccagcatatgaaaaaacgaagctatcaaacgggaaattcttaacttctgtttttttagaacaagatattagtaataaaattaatagaagagatgtggatgttatcttcatagtgaactgtttatttttttgattcagaaaagaaaacgggcagatcaaaagtactaaataattgtctttgcaataagttctttatctttgtaaacgcaatttaataaaatgaaatcatggcaaaaggtcccgaaaaaaacggcaaaaacaaggctttgcataccaaattgctaaaacgcaaaaaagctaaagttcaggaagagaaaagagagcgtgctttaaaattaaaggctttagtagcaaaaatgaatcagaaaaaaaatacggatgaatctgatcttatttagattggaacgtgttttctgccttctctgttttgagcacaaagactgtgtttctgttaattaaaatagggtctagattattcccttttgggtaaaacgtaaaaaagcagtaaacaattatatgtttactgcttttttaaatctgaagaaaggtcctatttcgagagtgaaaataccttgtaactgatcgtaaatgatatcatattggttttaccttgaagggtggggccggtgtaattattggaactatcaaaactgtgtgtttggacatcttccagtaaattagccaaccctaaactatatctcaagtcaaacctgaagtcattgtatccgcctgttagtcctagtcctagcccataattgaatttagaactgtcttgtagatcggattcatttaataaatagggtaaatagtattgattagtaacatcagcaccttttgatggtgtaattgggtcaacgtatgaaacgaaagcacctgcctgtggtccaaggaaaaatctgtcctcttctggttttaaaatgtaatagttaacataagctccaaaacttatatcggaatatttgtatttcgagttttttgcttcttcaaaattatcctcgacatattttacatctaatatattttgtttgtatgcaaactcgaattgaaaattgtaattttcatgataacccaaatggtactgtgctccaactgtaaaaccaggtttagaatcagtgagtaaatcagatgattttaaattgttttgagaaaagcctgccgaaatatatactcctctgggagcttgagcatatgtagataaattatataatagtattgtgataaaaagtagtatgttttttttcattattgtagatgttattggcatttaatatattctgtgtcgaagaaaaaggataagatttctcgattattttggtcgtgtagatcatatttgcttagcttggtcattaaggcagggcaatccgaaaagtactttttaatgaatggagagatctctcctcgaagtgctatttttccttctgtgtttgttgatgtaccgttaatttgatctaaaatagtttcattattatcaattaaatacaattcataaaaagtttttttaaagccttctacatggtgtccctgaattgtttctataatataggcaagaccaacaagttttcgatcgtttttttcgccatatacaaaatatacatctgcttttttcttttggtttagatgaaacgattttagtaaagaggggcctataacggcatgatcgagatcttcaaatttgatatacttttcccaactcttgccaaggtttacatacgatattcgcttatctaccaggagtatgtctgtaacttcatcacgagtaagtatcttgtttccttttttgtcaactatgtaggagttttgcgcaaaagaatttgaaaatgtaaaaattaaaattagtactaatagtttcattttaattttctgttatagttgttgaagcatttaatgtaaaagaagatggtttaaaaattacattacagaatgctgctgtcagttttccatttgaagaagatatatacacgactccttcgcgggcgcgagcaagatctaagtaattaaagcttacgcaaacttcatttttttccatgaaagaagtgggacaggaactgcaaatagtataaatgccgggaactggttttacatcattagcaaattctatccttagatcgccctgagacgagctggcagtcattgtgaaattatcagttctgttggatgtggatactgaattaaattttattggagcgaaagaacctgtgaaaacaatggtatttttgttggtagtgcaaggaatattgggagcattaacttctacaagcaatttactttcgatactttcgcagattccttttgttgtttttaaggtgtattctcctgccatagcagatgtaacatttttaataattggattttgaaggttggactgaaaattattaggacctgaccaattgtatttaacttcaaaaccatcattaaagggggtttccagctccaaagttgcgcctggtactaatggggagttactgctgatttccgtagtaggtagataacatgttactgcatcagtcgaagaacagctcccaaacaggagtgtgcagaggcttggaatgagaagaagtagtttttgcttcataaaaaatgtgggaataatatttgtttttgattaaaagagcgcaaaagtatgttttttattaagtttttacctagattttaaagagaaaaatagctgctaatcttatgtttccggtaagtagttcgtttgcttttgtttaggttctaagtcttttaatctgaattcctttttctttaaattatagattttgttctctgtttattttatccgaaatttgcatcaaacacacttaaataaattcaaaatggaagaatttggcagaataatagtttctgaaacggcaatgaacagtgagaatctgcaggatgtgattcactcgaatatttcggtaatcaatttaatgcgtgaagaaggggtcgatgatgagttcatccacgaagatgctttgatgagttattatttagatttctattggtcacaatatacagaagggaattttgctcagtttgtctataaatcaggttggaacaaagaattaaacgaacttattgaagaaggtctgactttaattggtgccgaaaaacacttggaattgtttcagcagcaaagcaaaaaagtgagattgatgagcagtgtaaaactcaataaatttttaagcggaaaattggaaggcgtaaacccaatacgtgatttactgaacaacgatgcgttttatgaattagaagaaaacctggtgagactaaatgccgatttcttaaaaaatcatcccgatttcgaagtgctttctgtcgatgatatgtttgcgactttggaggaatttgtgggacatgagattaagagagtttagttttttaggttcagaggggcaaaggttcagaggttttagttgggttttgtcacagagattcgcggagtttttcacaaagcttcacaaagttaaccgaaaagagcctttggctcgagacatattgtagggatggattttaatccgtcctacaaagtttacaggaaagagccttcagctcggtccatattgttgggatggattttaatccatcctgaaagaaaacaaataattttacctgaaattacattttccgtctaatcaataaaatcttgagaaaacaaatttccatttgtaaaaaggcggtttttgccttgctgttcttgccgatagttttatccggtcaggtgaacaatacagatacaactgataatgttacccgttattattacgacgatcaggtagtttcggtgcaaatatggtacggagcagataaaaatccggacagtaccaaaacgtattatccgaacggaaagctaaatgaagttttttattacgacgaaaaagggctaaaagattccgactgttttcagtacaatcaggaaggcgaaaagttagtcacctggaatttttcgcatgggaaattagttagcagaattgatcacaaactgcctttcagtaaagacaaggaagagtcggtaaaaaaagccctcaaactacttatcgaaatcaataccaaaacaaattacaatcccactaaagtgaatgatctgtacaatcgcggtgtgttaagcgttagtttgggtaatattacgctggcacttgaggacttaaaaaaagtcgaatactcgattgataaagatcctaaaaataaaagtatcgttctggccgattcgttagaacaaaagaaagatttgtttcgaagcaagctttacgacagattagcctttgtctatgcatcactcgaaatggatagttttgcgatccagtattaccataaggccataaaaagtgctccggacgatttacgaatcctctataattttgcttcattgctccagcgaagaaagatatacgatttagcgtgtttttatctggagaaaattgcagctgtaaaaccggatcacgcatatgcaagatggagcctcgcgaaattgtacagcgatacaggcaattatgagaaagcgatggaaaatgttgcaaaagcttttgcagctgaaaatacaattgcaggcagaaattcggcttacggtggcagggatttaagaaccatccggggtttaatctatcacaaattaggagaatcaaataaaggaatctccgatttaaaagcagcattagaaacggataaaaacaattcgtacgcgatgaagaatctgggggttatttatttggagcagcataaatacaaaaaggcttgcgagttgtttcaaaaagtaaaagagctcaattatgctctgatttatgatgaaacagatttatcagcattgttggaaagtgcctgcaataatactccgcatgaaaatacaactacgaaaaaaccatatgctttcccgaatcccgcaacaagtgtaatttcgataaaagaccttaatgccgaaaactttgattatgagttttttaatttcgaatcggtttctgttttaaaaggaaaaagtacagatggaaaaatagacgtctcgaccctgtctgctggtttttatgtgcttaaagtgactatggcaaattcaacagcaagttttagggtgattaaagagtgaagagtgaagagtgaagagtgaagagtgaagagtgaagagtgaagagtgaagagtgaagagtgaagagtactcaaaaaaggcaggtaaagaagaaaagtctttctttcacacagtttactatgtgctttttaactagtgaaatgccttttttaagtttacaaagactatgtttctatgtgttaaaacaattttgatgttttttaccggaagaaatagactaatttgctaaaactgtctttctttctaaaggcctgaactgccaggatacaatagtcaaaacaattagtaataccggaccgaatagttctttggggtgatctccaaccactaaatgcgaaaaaacagcacccgtcatggtaaagaaaaagcctgcatatgcccattctttaagtaatggaaatttaggaattaagatagctacagctcctaataatttccaaatgccgatcagtgttaaaaaatacaccggaaaccctaaatgctgtatcatgccttcctgttcttttatttttagcatttgtacgattcctgttgctgtcattcctaacgccagccataatgtagcaacccaatagatgattttgtctctttttttcatgattttatagtttagtttaagttagtttagtttgttttagttgggaattattttaaacacatagaaacatagatttaacaatcccgaaaaaggcatttcacttattttaaagacgcaaagactgccatgtgttagaaacatgtttctttttatattcttttagatacacaaaatctatgtttctatgtgttaaagcattgcacctacgagtttagtttaattttttggcagcgaattcttgtaatctgttgtgagccatattgatcccctgagcaaaaggcagttttaacatctgatctctaagtgcagcagatctgtaaataatatgcatttttaagagactggtttcagctgttacggcttcaaattcaagaaactcaagctgaggtggaaatggtgagccttccatttcaaatgttcttgtgattttctgctccggaaaaaactcgtgaattactccgttggctttaaaaaccacattccctttaggatcggaagtttcaaattgccagcctccgtactttttgttctccagctttagcactttggttcccatccattgttcgacaatttcgggctctgtataagccgtgaacaataatttcagaggaagatcaaactctcttgtaattagtaaatcctgttgaccttcttcggcagtaattttcgtttttcgttccataatttggttattctttcggtttatagtttttcatgatactttccagtttgttaaaacgatcgtcccacatttggcggaacggttctataaaatcagcaacttctttcatttttctggcattagttacgtaataaatttcccttccattttgcgtttgctccagaagttcacattccgttaatatttgaatgtgttttgaaattgtttgtctggaagaattaaaattttcagcaataactcccggagtcattgactggatagctactaagcttaagattgcccttcgggtagggtcggcaattgcctgaaatacatctctacgaatttccattatgcagttatttgacagcaaatataatgcagttatttgactgcgcaaaatttttgacacattttttttaaaatattttattgtaacagtaagattgtcaatgtttttaaggctttccagtgatgaagctacagagtagataagaagttaacggctcgcaattttaaattccattcgggcaagaaagagtataattgcgatttctgcgagaaaatagaataccgctaaataagttaggtgtgtataaagatagagcaacaggcctgctgtgacaccacagtataacaggttggcaaaagcaataattttgaggcaacctcgccagttctcatttgcaagccagtaactcgcaaatgaagaagccataagcaggcaggctaaaacagcaagaagatagagtgtttttttaggaacgccgaagtagatttctaattcaaccagtactacgcccaacaaaagggtagaaaataaagctcctaagccgtcgatcagaaatatttttttcgaatttaaaatcataggttctgttgggggcatttgttttggtttattaaagttaggtctaaaattttaaattacaatagtttgacaaaaaaaaatctagtgaataaaggaattcactttcagaagtgttttgttatttaaaaagagattggagtagagatccaaataaaaaaccactctttccggtttataaaagagtggttttattgttttaaggtgcaaaacattatatttttttgagggtaactttcatttctttactgtctagtgtcagttgatcttctgttatgatactttcacaagggtaaggagtaccggtttcatcctttatgactaaatttttaccaccttttgttaaagcataagtaccattgttaatttcttgagtaagatatccggtaacatgtccgtcttccgtaaaggtaagtgtgccctgtgttagaattacatttttcatagaatctgaaattggtaatttaggctctacagcagtaattttccaggagttcactaatttatttcgacctttatgacatgaaatcattaatacagccagtactgcaattgcgaagataaataatttagattttttcatgattttgtggttatatgttaaactacagaaaattacaaaatttattctaattaaaaatctaaaaatcaaatatttataaaattactatcacacatgaaaaaaccttaaatctaaagggttttgtgtctgaatagcttcaaaaaaactagtttaaggtgagctctcccagaatttcttcgtacataaaaggcccacccggatatttggccgtatagtccaggttcatccatacctgcccacgttcgtctatatggtagtgaatttttttgccataactttcttttacaaaaagcacatttttgatcaggtaattcactttttccaagtcgattgttgacccaataagtatttcagggtaaatatgtcctttcgtatgaatcaatcggggagttccgccaatcgatcgaactgcagcggccatcagtatagaatgatcgtcgcaatcgcctgaaaagtattctaaagattcactcgcagttgcaatataatccccttctttaggatcattaacataattccaacggctgttgatttctttaaacacagcaaaacactgaatgatggttctgtaatctgaataacctttaaggcctttaaaatgcttagaagtggccataatggcaaagtttcgaacctttggattctgatactctatcgcattgatgattttggatttattaggaaacggaagcagttttgctacaataatatcctgtgggaatggattgtcagacatggtataaatcatcgaattgtagtcttcggagatttcactgaagccgtaatttccaataaccgttccgtagaacaatactaataaatataccgcaatgcagagtataatgatggttctgagcaacatcagaagaaagaaaattgcagtaaaaaccagtacaaaaatcaaaacacgatctaaattgaatgcccattgtaaatcgatcagattttgatgtaatatgataaaaattggaaccgtaattaaaagactcaatagcataataataatcctgtcccagggtgatttcacctgtaatttggattttaattgcggaaagtcaattttaggaaattttatcataagattcaaaagcagtttttacagcgctttcacggtttcaacaaaagtactttttttctcaataattcccagatcaaataattgattttgaattttgataaaagctttctctgtcaattgcttctgagaccatttggttaattttaaccactcctggatgtcttcttgtttttgattgaaaagacttgccagagttttgtcaatatttggaatctgagcaaaatcctgagttgttctattgattatctccaatatctgctcgactattttagggttctttttcaaaaactcgtctctgacggcaattacaaacgatggccatggagtagggcagtcaccaactcttctgaaaataccttgatccaccagtggcttggtcataaaacgctcccacataaaataatcggcagttccgttagtcaaagcttcaacagcgccgtcaattgtatttatgatttcaaactgtaaattatcggttttccatccttgctcatgtgcattcacataagccattaattgagatcctgaacccaatcgtgaaatggctgcttttttatctttaagatctttcacggtctcaaaagctgattttgcagcaacatgaatcccccaaatcaaaggtgattgtacgtagatctgaacaattttgcttggatttcctgctgcaatatcttttagaataccttcagtcaggataacggctatgtcagcttcatcattgcgcagcatctgacacattttgccggttccttccggaatgtcttcccattgtaaatcaatattttcggcttcaaattcaccattttcaatgcacatttgccatggtaaattgaagtgctcaggaacacctacaatttttacagttttcattctaagtttagtttaagttggttaagagtattctaagtttattgggacattaattttttaataaatcagttctgtgtttgtctgataaacaaggttcggcaaattcaattacagcatttgcttcgtattctgataataagttttttacaatcgaataatcagtatttttcgcaatttcgactgcaagaaaggtttcgtttaatgcttctgataaacaattgattgcttttaatttttcgcgtatgatttctttatcaaattctttttcaagaataagaacctgtacgattgagtttcctgaatgttctatagtttctttgtgaataaaacacttttcattttcacaatattctgccctgaagatatcatcagtagcaattaaaggaccaaaaaagggaatattatccaatttaaaaagacctttctcagaatctaaaatttctgcccacatggtttccgacactatttcttccaggtaagtgctgtagtatttgaacaggatttttttatgcgtttctgccattatttcattttatatttattgcaacctctattaattaatctcatcgattactgctttcaaaggcgatattacaatgcgataaccgtcaggatctaagaacatctttccgttctcattccagaaaggattggttgcagttaagatggaggtattgttgcgttcaatcctgtctatcaattcattgtaatccataattgactttggataaagcacaattacatcatcttcatcaaacgtatgatttgcttttacttttgattgtgtaaattcgaaatgccagtcggactgtggcatcccaagaaaaacaccgtcgtaatctttatgtttctcaaagctgcccaaaagttcaaaaccaaggacattgatataaaaattagctattttttcaatattatcggtatgtcgggcaactcttaaaaacataattttaggatcttatttgattaatatgatgttctaaatgttctacataatcagtcattagaaactttagatcaattacagatgcatcgcttaaaatgatctcataattcaaagctttttcatccacattcttcatgatccttacaatttgacggtttatggagagccatagctgtgtaagatcattaatgtccatggtttgatactgatttaaatttaccagatccatttgactgtaaggtctgtgataatacggtttttccagataattaatttctgtaaaacgaaccagattatgaatccctgaatcaaccaaatgcccgataacttctttttttgaccatttcccgggttttttagcttccagaatttcacttttcagagaagggaaataggtcgaattatccttcagtaatttttcaaactttaaaatagcattttccatgaataatctaatttccgaatggattatagtattgaattaatttcctgccagcttatcaagggtatacgcaataagtgcgtcaaccgctttataaggatcctcgctaaaagttcctgaagcacgattggcgataattgcatttaaagaaagtgcattatgtcctaaaagtgcagaaagcccgtatatcgctgcagtttccatttctaaattggtaattctttgttcgtcaaaactaaaattatccattttattgtttaattcctgatcctgaatgtccaagcgtaaaacacgtccttgtggtccgtaaaaacctccggctgtagcagtaattcctttgaacatttgatccgattcgataattttttccagcttttcagaacatgcaatggcataaggctttccttttttagcatcccagttcgtatgtttgatgaaagcttcttcaatatcagcattcgaaacttcatcaattaagtaggagcgaagcatgttatcaagtcccaatccgtatttagacattacaaaactgtctaccggaatatcggtttgtaaagaacctgaagttccaattcgtataatattcaaagaagtcaggttttcttttggctggcgtgtttcaaaatcgatgtttaccaaagcatcaagttcgtttatcacgatatcaatattgtcaggaccaattcctgttgacattaccgatattctttttcctttatagattccggtttgagttttaaattctcttttttgtgtagaatattcaatagaatcaaaaaactgagtgattttttccactctgttttgatctcctacgaaaataatatcgtgcgcaatatgttcaggacgaaggtttaaatggtaaacactcccgtccggattaagtattaattctgaattttgtatcattttttttaaggttctaagtttttttaaaggtactaaggcactaaggttctgaggttctaagctttttttgaaaattctaaattctaaatttttctagacaaagctttgcgaactttgcgtttttattcaagggttactattgtaaattctttgcggacgttgcggttagattatttaaatctaaaatctgcaatctaaaatcaagaatcatcacccgccaactcttttagttttaaatcctttagctttaaggatttccataattttatcccgataatctccctgaataattatagaggcgtctttaaaagttccgccaacactaagtttggttttgatttctttagccaatactttgaaatcttcgtctgatccttcgtagccttcgattatggtggtggcttttcctttccgtttttcgaatttgcaaatcataggctccttttggatataaagaacatgatcctgttcctgaatttcttcaggttcattggattcgacatgatccggaaacaaattttttaattgatcttgtaagtccataatttttatgctaaaaaataaatgctaattaaagatagtatgtaaaaaacaaattccaaatcccaatgatgagtttgggatttggaatttttaaattttggaatctaatttaggtttatttcttgattaaacctaaatctaccaagcgttcgtataaataatctccagctgtaatatcttcgaatttcttaggattctctgcatcaatacagttttccaaacaatccagcttcatatcgcttaccggatgcataaaaaacggaatagaataacgagaggttccccataattctcttggtgggttaactacctggtgaatagttgattttaacttgttgtttgtatgtcttgacaacatatctccaacattaattaccagctgatcgtcttcagcaatagcatcaatccattcgccatcgtgattctggacctgtaatcctttaccctgagcacccattaataaggtaatcaaattgatatcaccatgagcagccgcgcgaattgcgttttccggctcagtagtaataggcgggtagtggattggtcttaaaatagagtttccgtctttcgcatattgatcgaaataaaactcatccagtcctaaatgtaaagctaaagctcttaacacataaacacctgttttctcaagcatttgatacgcttctttacctacaacattaaaacgaggtaattctgtaacatttacattttcaggatactctgctgcatatttagaagaagcatccacgtactggccaaaatgccagaattcttttaaatctccctctttgcgtcctttagcatgttcttttccaaaagatacataacctctttgtccgccaataccgggaatttcataattatgcttagtttctactggcaaagcgaaaaattttctaatttcgctatatagctcgtctaccaactggtcgtctaaaaagtgaccttttagggctacgaagccaatgttttcaaatgcactgccgatttcatttacaaatttttgtttacgtttcgggtcgtccgaaaggaaatcacgtaagtctacactaggaatgttttgcatactttacatttttatttaaagataaaaggcgttgtaaaacctttcagtaacaaaggtagagaatattttagtcaagaaccttaggtttgtgataatatcaataagtagttttttttgaagatagtattaacaaacaaggccatttgtaaaaaaaaacttaaatgatataataatctaaaataattaactaactttaggtttgttaaaatttagttagttaatttaaagataatgctattcttgatttatatttaattggttattaaaaaattaaggatacataaaagcaggtcgattgacctgctttttctgtttaataaagtatgtaaaaacgagattatttcgcttgtttcttcatttctttttcaatcatatcatagaattgatcgatttttggcataaccacaatacgagttcttctattacgggctttgttctcagcactatcattagctactaatggtacataagaacttctaccggcagcgattaatttagcagggtttacaccaagttcattacttaatacacgaacgattgaagtagaacgtttaacacttaaatcccagttgtctaagataattccattacttttgtaaggaacgtcatctgtgtgaccttcaaccatacattcaaaatcaggtttgtcgttcactactttagcaactttagccaaaacagattttgctttgtcgctcacgtcataacttccacttttgaataataatttatcagcgatcgaaataaatacaactcctttttctacgttgatttcgatatccggatcattgattccaacagctccttttaagcttgtaactaaagctaaagttacactgtctttcttagttaatgcatcctgaagtctagatatttttaaatctttttcttttaaactttctaaagatttctcaagattttcagctcctttagtagttaacacagttaagtctttagaagtactgattaaatcctgattgtgttgtttatagctttcagcagttgctgctaatcctgctttttcttccaaacaagtatttaatttaactgtgcaagagtttaataaatcttgtatctctttgttcttagcttctaaagcagcatattgcttcttcgatacacacgaagttaaggccattagtactgatagtgcgataactatttttctcataggtattatatttaattaaacgttgattacaaatttagttcttaatattttgattaatgttaaagatttctttaaatacctgtaatttctttaggtaatacaagtaaacgatacttttaaccatatagtattcttgtatctggaaatctttacgctttttaaggtattttaaagatatgctataaaaagagaaatgagctttcaggatagcataagtatggccaacctttccctgagtgaggaaacggatacccgctattccgtctaaaaccattcggaagaaaatcacaaagaacagtctctttttaggtaaattcttaacgagcatcaataatgaatttctaaaatttaagaaagtctttcttggatttccttgttgcaaagtcgcacctccaacatgataaacagtggaaccggatacgtacttaatcacgtgtccttcatttgcagcacgccagcacaaatcgatttcttcctgatgagcaaaaaaggtctcgtcaaaaccacctaattcatggtatacttcacttctgataaaaaaacaagcccccgaagcccaaaacaattcacaattatcatcatactgcccattatctttctctatcgtatcaaaaatacggccacgacaaaaagggaatccatatttatcaatgaaaccaccggccgcacctgcatactcaaagtattccttatttttataatcgagaatttttggctgaatgattgcggttagtttttcattctcaaaagtttcaaggataggagtgagccaattctcagtaacttcaatatctgaatttaccaatgcataaatttcggcatcaatatgttgcaaagcatcattgtaacctttagcaaaaccatgattgcctgtgttttgaactatttttatggaaggaaaattattcttaacaaagtctatagaatcatccgttgaagcattgtcagcaacataaatttgagcaccctcagaaaatcggataacagaaggtaaaaattgttctaacaattttacgccattccagtttaaaattacaacagctattttatccaaaagtaattcttatttattttaatattattctattctttataatcgggcaagcttcttaaaaactgatatttttcattctcaaaatccatctgacagtaaaaatgattcagtccgtttgtgacgttcaaaaaccgtgcctgcattgtcatgttataacgggcaatctgatcaaaagttgcctgagagattttaacttcgggggctttgcattctaccaatatatgtatagagccatcagaattgaagaccactacatcatacctcttccttaaaccattgacagtaagaactttttcaacgtttataagtgatttagggtactttttctcaatcattaaaaactgaacgacatgttgacgaacccattcttctggagtaagaatgataaattttttcctgatttcatcaaaaatagacactttattttcgctatttttgaatcggaaagtataggttgggaaattaagtttaagcataaagcaaatataatttgaaaattagtcaatttgaaaattaaccaattatttattttgaattaaactgaagactgataccgcatactgaaaacttaatttaatggacgaagttgtaaaaattgttaatgacataaaagccggaaatataaaaccgatctattttttaatgggcgaagagccttattatattgataaattatcggagtatattgaacagaatgtgcttgctgaggaagaaaaaggattcaatcagactgttttatacgggagagatgtatcggttgaagatattgtagcaacggccaagcgctaccctatgatggctgatcgtcaggttgttattgtaaaagaagcacaggatttatcgcgaacaattgataaaatagagtcttatgtaggcaatccgatggagacaacggtcttggttttttgttataaatacaaaacgctggacaaacgtaaaaaagtaaccaaattactggctcagaaaggaattgtttatgaaagcaaaaaattatacgaaaatcaggttggtgactggataaaacgtgtacttgccggaaagaaatatacaattgacccaaaagccaatgcaatgctggttgaatttttaggtaccgatttgagtaaaattaataatgaattagaaaaattgcaaattattctaccacagggaaccgttattacgccacaacatatcgaggaaaacattggtttcagcaaagactataatgtttttgaattgcgaaaagcgataggcgaacgaaatcagttaaaggcctataagattgcggagaattttgcccataatcctaaagaatatccattagtaatgacgacaggattagtattcggtttctttgttcaacttttaaagtaccatggacttaaagataaaaatcctaaaaatgtcgcagcagccattggggtcaatccttattttttaaaggaatacgatttagcaataaaaaactatccgatgcgtaaagtgagccaaattgtaggtgcactgcgtgatgttgacgttaaaagtaaaggagtaggagccaatgcattaccacaatccgatttattaaaagaaatgttatataaaatattcaattaaacaattcaaaattagttcattaatagtgtttttatgtgtaatgaacgtatcaatctatcctgatttattcgcttgaaattttgtttttaaaatcacaagtgacagggacgattttgttctttcttttactacatacataaaatgagtacagttacaggaactatttgtcataatagtagtatataatttattaaaattttggtaaaaacaatctaaatttactatattacctcaatataatttatataaaaaaattcggtggccccatctactttaaatttacgcatttcaagaataaggattattcttgcactattggtttgtcttttaactggttttaagagtcattctcagtctcaaattctctcgaaaaaaaaatcagacattattctgtcaaagattgatagtataaaaaagttaatccaaacagagaatgtcgaaaatcaccttttaggacttaaaatcttaaataaaacaaaagcatatctagaaagaacaaaagacacggcaagtcttttattctttcacagagagagtatcaaactaatttcctatttacgaagttttggaactccaaatgcttatctttttgaaaatttccaaatcttaaaaaaatacaatgataggcgggagttagccttattacacgaagctcttggtgatttgagatattatgaaggcagtaagttattgtcgcatgaatatgatttgaaagcgcaaagcttaataaaaaaatatggcaactatgaggacaatataaacataaactacaatctctccgtttattataaaaactctaaagactacaagaaatctattgattttgcgatgacctcgcttgaaaacattaagaaaagcaacacattcgagaagaacaatttcaagataccaaatttatacctcttcatttctgaagattattaccatttaaaagaaaatgacagcgtatataaatacctgatacttgcagaagaaacaaaaacgaataccacagacggaaggtttccttatggagctaagctgaatgaattaaaagcaatgtattattacaatataggagatctggaaactgcggcaaagttgtaccaaacttcagtatctgaatatgttaaactcaatcagtttaaaatgagactggttcaaaaatcaaacaagctaaacagtactttaaaaataaaaagtattgagaataaaggaaaaattaatgaagcgagacttgaaagcgtaagtgaatcttataaaaattatttgttgatttttgccttattgattgttctgatattgacagtactatttataattcaatttagcgcctataaatataaaatgaaggtcaatttaatccttcagaagaaaaacttagagttaaaaaaaataaatagagagttaaatgaggcatcgaaaataaaagatacttttcttgatgtggtaacgcatgaattgaaaactcctttaaatacaattaaaggaacagcatatttgcttaaaaatgaaaaatcggaacttctaaaggaagattatattaaaaatttaaatttttcttcagattacctgctaggttttatcaataatatggtagattttaaaaatctaaaacgtcatgatactgttaacttagactacaaagacattaacctggaaataatactaaactccatcattgaaatgtttagaatcaataatctgaaccagaacaggatcttaattaattttgatgataaaatttcacctactttaaaatgtgatgaaataagatttactcaggtaattatggagttgatgacgaatgccgcaaaatttactaaatatggcgaaataactttaaaagcagaattaattcattctgttaacggtgaggaaagtattaaatttgaagtttctgacacgggaattggaatttcagaagaggttcaatataaaatatttgaaccatttatacaggaatcggccgagattaatagtaattacggcggaagcggtctggggttgtcaattataaaaaggacgttagaactttttggaagtcagatcaaagttagatctaaaaaagatgaaggaactactttttcgttcgtaatcgattttaaaatttctaaagaaaccaatgacgaaactattttcagtgatgctgaaagacaaaaagagcaactttcaaatatcgagattttattggttgaggataataaaatgaatcagctgatcgctaagaaaattttagtcaataaaggttttaaatgtgaagtagctaataatggacttgaagcagttgagaaagtaaaagctaaaaattatgccataatattgatggatataatgatgcctgttatggatggttttgaagcatcggcaattattagtaatttaaaacctgaaataccaatcgtagctttaacggccatttgcgaaaatatcggcaacgatgattttcaaagggctaaaattttagaaaaacttgataagccggtagatccagatattttgtacaaaacaattttaaaatatgttgtacaaaaaacgctttaagatctatggaaattcacgatatttgcatctctaaaaaattactacttttaaaatactaataacgcaattatgggaatgaataaaaataccatcctgggatgggctacttttataatggtgcttatgggcttgttacttattggtcttggcgctttcagatacagagatgtttcaggctggggatttgctgcaaccggagttggttttattgcaaacgcctgggtttttaacgctttgaaaggaagggtgtaagtttgttgttaatagtttgttgttaggactagaataaatctgaagatttacatatttggtataaaaccagaacataatgctaatatgttacgttattgattcaatcaacaactttaaaaacaaatgaaagagctgcaatagaaaaaaaataaaattaggagaatgatgaattctttaaagaactgtaaaatcataaggagttaactttaagtaattcaataataaataataaacgaataactataaacataataataaacataacatgtcagacgataagaaagtaattttctcaatgcaaaaattgagtaaaacctatcaaggagcagacaagccagttcttaaaaatatttacttgagtttcttctatggagcgaaaattggtattttaggacttaatggttccggaaaatcttcacttttaaaaattattgccggagttgataaaaactatcagggtgatgttgtttttcaaccgggttatactgttggttacttagagcaagaaccaatacttgatgactcaaaaacagttatcgaaattgttcgcgaaggagcagctgaaaccatggcagttttagaagagtacaatcagattaatgatttgtttggtcttcctgaaaactatgaagatcaggataaaatggacaagttaatggatcgtcaggcagctttacaagataaaattgatgctcttggtgcgtgggaaattgatacaaagcttgaaattgcaatggacgccttacgtacaccggaaggagatacaccaattaaaaacctttcaggaggagagcgccgtcgtgtagcactatgccgtttgttattgcaacaacctgatgtgttacttttagatgagcctaccaaccaccttgatgctgagagtgttctttggttagagcaacatttagcacaatactcaggaactgtaattgccgtaacgcacgatagatacttcttagacaatgttgcggggtggattttagaattagacagaggtgaaggtattccatggaaaggaaactattcttcatggttggatcaaaaatcaaaccgtatggctcaggaagaaaaagtggcttctaaaagaagaaaaactttagaacgtgagttggagtgggttcgtcagggagcaaaaggtcgtcaaacgaaacaaaaagcccgtttacagaactacgacaaattattgaatgaagatcaaaaacaactggatgaaaatctggaaatctatatcccgaacggtccgcgtttaggaaccaatgtgattgaagctaaaaatgtagcaaaagcttttggggataaattattgtacgataatttgaactttactttgccacaggcgggaattgttggaattattgggccaaacggtgccggtaagtcgactattttcaaaatgattatgggagaacaacaaactgatagtggagaattttcagttggtgaaactgtaaaaattgcttacgttgaccagtcacattctaacattgatccaaacaaatcaatttgggaaaattttgctgacggtcaggaattggtaatgatgggaggtaaacaggtaaactcaagagcttacttgtcacgtttcaattttggaggtggtgagcaaaacaaaaaagtatctatgttatccggtggagagcgtaaccgtttgcacttagcgatgacattgaaagaagaaggaaacgtgcttttactcgatgagcctacgaatgaccttgacgtaaatacacttcgcgcacttgaggaaggtttagaaaacttcgctggttgcgctgtaattatttctcacgacagatggttcttggatagaatctgtacgcacattcttgcttttgagggagactctgaagtttatttctttgaaggaagtttctccgattatgaagaaaacaaaaagaaacgtcttggtggtgatttaactccaaaacgtttgaaatacagaaaattgattagataatattctaagtaaattttaaaataaaaaaaatcccaaattcttatcctatagaaatattacaatattaacagtttaagggtttatttgttaatagtcttttagtttgtattcaagttagtactcttgttttttgatacgaataagggggaattcgatttgaattggaaaatcaataattaatttattgataagtagtagtttacaaatgtaatacaaatttatttaaaaaaaagcatgtaataaaaaaaaatcgattcgctttgttaaaggaatcgatttttaatttttttaattttttaatttagaaagagaaacagcattaatacaatatcgcaggccacttggttcgggaccgtctggaaaaacatgccctaaatgggcatcacaggtattgcaaacgacttcaacccgaatcattccgtatgatttgtcagcatggtatgcaattgcattttcttttaaaggctgagtaaatgagggccatcctgttcctgactcaaacttctcagaagcatcaaataataaagttccacagcatttacattcgtaaattccggggtcaaacaaactgcaaagttcagaactgaaggatctttcggtaccttttaatcgggttacctgaaattcttcaggagttaaaagctgttgccattcttcctccgttttttctactcttttttccggtatcggatttcctttatttgtaaaatgaattacatctgcccattttatcataactatattttttaagttttcagtcgtcagtcgtcagttttaagttttcagtcgtcagtcgtcagtctcagtcgtcagttgtcagtctcagtattcagtctcggtattcagtttactgcgactgcaaactgcgaccggatactgattactaatttattcttcctctttctgtcccatcatcattaagtaggcttttaggaacggatctatatttccattcataacgccatcaacatcactggtttcatagcctgtacgaacgtcttttactaatttataaggttgcattacgtaattacgtatttgtgaaccccattcgattttcatttttccggcttcgatatcggcacgttgtgcttgttgtttttttaactcaatttcgtacaattgagaacgtaacatctgcatagcacgttgtctgttgtcctgttgagatcttgtttcagaacattgaatctgaattccggttggtttgtgtactaactgcactttggtttcgaccttatttacgttttgccctccggcaccactggaacgggaagttgtaatttcgatatcggcaggattaatgtcaatttcgatactatcgtcaacaagcgggtacacataaacagatacaaacgaagtatgacgtttggcattactgtcaaaaggagagattcgcaccaaacgatgcactccgttttcgccttttagataaccgaaagaataatctccttcgaattctaaagttacagttttaattccggctacatcaccttcctgaaagttaagttctttgattttgtaaccgtaactttctccccacatcatgtacatacgcatcagcattccggcccagtcacaactttcagttcctccggctccggctgtaatttgtactacggcacttaaactgtctccttcatccgaaagcatgtttttaaattcgatgttttcaatatgagcctgagtggtgttgtaatgttcgtctaactctgctgcagaaagttcgccttctttataaaaatcatacgcaagttgcaattcatcagtaagttcgattgctttgttgtaatcttcgatccattttttcttgtttcgaaggttttttacaatagcttcggcttcttttgcattgttccaaaaatcaggtgcaaaagttttttcttcctcgttcgcaatttcgattagtttggcatcaacgtcaaagatacctcctcaacgcaccaaggcgctccacaataccttttatttgttcggtcgttgtcataaattaatagtagttttatatgttttttacaaatattacgttaatttggttctatcgttatcgggaagttaaaatttactgaaacttaccaaaattaactaacagtaatacgtaattttgctgtacaaaaataagatatagtttttagaatatggaaataaatttaattagcgataccattactaaaccaacatatgaaatgttgcagtatatgtttaatgctcatgttggggatgacgtatacaggcaagatcctacagttatcgaattagagactagagttgctgagttttttggtatggaagccgggcttttttttccgtctggaactatggcaaatcaagccgcaattaaattacatacacagcccggagaacaattgattgcagataaatatgctcatgtttatcattatgaaggaggaggagtttcgttcaacagcggtgtatcctgttgtttgttagacggacacagagggatgataaatgccagtcaggttgctgcggcaatcaatgatcctgagttttatcacagtccattaaccagtttggtttgtgtagagaataccaccaataaaggaggtggggcttgttatgaattggaagatttaagagagataaaaaaagtttgtgatgctaataatctgaaattccatttggatggagccagaatttggaatgcattggtggctaaaagacaaaacccaaaagaatttggagcaattttcgatacaatatcggtttgtctgtctaaaggattaggcgctccaataggttctgtgctgcttggaacgaaagaagatattcgtagagcgttgagaataaggaagatacttggtggagggatgcgtcaggtaggatatttagcagcagcgggattgttcgctttggcacataatattgaaagattggcagaagatcacagaagagctaaagaaattgcggctgtattaagtacaaaatcttgggtttcagcaatagagcctgtagagacgaatattttgattttttctttggcagaaggatatagtgatcagcttttgattgaaaagctaaaacaaaaaaatatcttaataagctcgatgggacataataagcttagaattgtcacacatttagattacaaagaagtaatgcatacttatgtaattgagacgttgcagaaattctgatgaaagggactaaggttctgaggttctgagtgaaaaagtattaaaaaaaaatgccgtcctaaagggacagcattttttttacaactagcatttaaaatccaaccttggttacttagtatctcagaaccttagtgtcttagtgcttttatttaaaaagattatccattcccggaatcattggcatatccattttggcaacggcatccaattctctttcgtttacgcttgttgctttttctattgctttattcagagttacaataaggtagtcttcaagttgttctttatcttccaataaagaatcatcaatactgattgattttacttttctattggctgttaatgttatttttaataatccgtcagcgctttgttcatcaatcaaaacggtgtctaaacgtttttttgtatcttcaattttttgctgggtttctttaagtttacccatcattcccattaaatccatttttgttgatttttaaattattccgtacaaaattagtatattgctgtatcaaagcaatatatattttatgaaaaaattaatttggttctgttgtgtttatagtatttttgctgcttcgtatttaaaaactaatgctcaatcaatgcaaaacgatatagtggccccaatagccaaagaagttccaaaatcactaaaaaaacataaagaaaccagagtcgataattatttctggttaaatgatcgcgaaaatcctgaggtaattgattatctgaatcaggaaaatgcctattaccagagtatgacttcgcatacaaaagggcttcaggaagatttgtatgaagaaatgaaaggaagaattaaagaagatgattcctctgttccttatttttacaacggatattattacatcacccgttttgagacaggtcaggattatccgatttttgccagaaaaaaaggcagcctttcagcagctgaagaaattttattcaattgtaatgaactggcaaaaggacatgcttattttaaattaggaggtttaagtattagccctgataataaattggcaagtttcggagttgatattgtaggaagaagaatttacacgattcagtttaaaaacttagaaacgggagaaattttacccgataaaatcgaaaatgcaactggaggatcggtttgggccaatgataataaaactgttttttataccaaacaagaccaggtaactttaagagcggataaaatttttagacacaaattacatacagttgctacagaggatgttttggtttttaatgaaactgacgatacctttaatgtttctgtcagtaaagagaaatcaagaaaatatatcgtaattggttccggaagtaccttaactacagaatacagaattttgaattctgataacccggatggggagtttgaagtgtttcagacccgtgttcgcgggctggagtacagtatttcgcattatgaagattcgttttatattttgactaataaagacaaggcaactaacttcaaactgatgaaaactcctgaaaataaaacaggaaagaggaattgggtagatcttattccgcatcgtgaagatgttttattggaagatattgaaatttttaagaactatttagtggtggaagaacgctcaaatggtttgaatcacattcgcattatgccgtggaatggtgaacccgattattatttgccttttggcagcgaaacgtataacgcctacaccacaacaaatgttgattttgatacggatattttgcgttacagttaccaatctttggcaacgccatcttctgtgatcgatttcaatatgaagacaaaaaccaaagaagttttaaaagagcaagaggttttaggagggaaatttgataaagaaaattatatcgaagagcgtgtttgggcgacagccagagatggtgttaaagtgcctatttcgatgatttacagaaaaggattggaaaaaaacggtaaaaatccgttacttctttatgcttatggttcttacggaatcacaatggatacttatttttcttctacaagactttcattactggatcgtggttttgtttatgcaattgctcatatcagaggaggagaagatttaggcagacaatggtatgaagatggaaaactgttaaaaaagaaaaatacctttacagatttcatcgattgctctaaatttgtaattaacgaaaaatttacttcttctaaacatttgtatgcagaaggaggatcagccggaggacttttaatgggagttatctcaaatgaagcaccggaactgtataacggaataatcgctcaggtgccttttgtagatgttattaccacaatgctggacgacagtattccgttgaccacaggagaatatgatgaatggggaaatcccaataataaaaaatattacgattatatgttatcgtactcgccgtatgataatgtaaaagctcaaaattatcctaatatgtatgtttctaccggattgcatgattcgcaggtgcaatattgggaacctgccaaatgggttgccaaattgagaaacttaaaaacaaataacaatttattgtttttagacaccaatatggatgccggacatggtggggcttcgggacgttttgaggctttaaaagacttagcaaaggaatttagttttttattagatttagaaaaaattaaaagctaattagattttttttgttaaatttgcaacctatcaaggttattttaaaatgcctttgattaactatttttttatgaaagaagaaataaacgcttataataatgttttagaattaataggcaataccccccttattaaactaaataaaatcaccgaagagttagaaggcaatttctacgcaaaggtagaagcttttaatccaggacattcctcaaaagatagaatagcgttatacattcttgaagaggccgaaaaaagaggtattctgtcgccaggtgataccataatcgaaacgacatccggtaatacaggttttagtttggctatggtaagcattataaaaggttataattgtattttggcagtaagttcaaagtcatcgaaagataaaattgacatgttgaggagtttaggggctaaagtttatgtatgcccggctcacgtttcagcagatgatgaaagatcatactataatgtagcgaaacgtttacacgaagaaacaaaaggttctgtatacattaatcaatactttaatcagttgaatattgatgcgcattacaactctaccggaccagaaatctgggaacagaccaaaggaaaaattacgcatcttattgcctgcagcggaacaggaggaacgatctcaggaactgcaaaattcttaaaagagaaaaatccaaatatcagaattttaggtgttgatgcttttggatcagtattaaaaaaataccacgaaacgaaagaattcgacaacaaagagatttatccgtaccgcatagaaggtttaggtaaaaatttaattccttcggctacagattttgatatcatcgataagttcatgaaagtgacggatgaagaaagtgctcactctgcaagagagattaccagaaaggaagggctatttgttggatatacttcaggagctgtaatgcaggccattaagcagtatgctgaagaaggagaatttacaaaagacagtaatattattgcgattttcccggatcacggttctcgttatatgagcaaagtattcagcgatgactggatgaacgaacaaggcttttttgacagtgttaatgaagaagaagttcaaaaaattgaatttgtgaagtagtactttaaactgcttttatactatacaactccattcgttttacggatggagttttttttacatctgaactttttggaagcgatcaattttaaacgattctctgtttttaaacaggtccaatataaaactaaaccggtaacatgattgaggttaccggttatagaatacgtgtcagcttaaagtagatttttttcagatgattatcattttagcttagcacacttaggacaacgaatacaataaccaaaaggattattgcatatctggtgtattttgatgttttcatggttttattttttttgtaaatataacagataatttgaatcaaaatctattttttgaaaccgatagcaagatagagtgagatttttatttggggtcttcccaaccttttcatctaaaatacactctatagaagtataatcgtctttgaacgatttgaactaaaaatagtatcgtatgaaaaagaaattcactttagaaatagccgacccttgttctgaaaattttgataatatgattcctaattcacaaggctcgttttgtaattcatgtgcaaagaatgtaattgatttaagtcgaaaaacgaatactgaagtggcccggttcatcgccaataataaagatcagaacatttgtgcccgattaagaacaacacagttagaggaggagtttgtacaccaggagacttctaaaatgaataatctgaagtatgcggcagtagcagcttcaattctattagcatcaaatgttacaggacaggaaaaaactccggttcaaactgaaataaatgaatcagtacctaaaagtaatattttgggtaaaatagccattagtcaaaccattcaggaagaaatttcgataaccatcaaagggaagttgttagatgcaaaaacaaacaggcctttaaacggcaagatctatccgaatttaatccttagtatcaatgattcacagcctcctatgaaaataaacccaaaaactggtgatttttcgattacgtccctggtttctaaaaacggtgaaggccttatgattacaatctcaagcggggattattatttatctaaaatgatcccttttgatagtaaaaaagtgaaaggaaatgttcttcatcaaaatataaagatcaatacggaggaattgattaaagtttacattgccgggggactagggattaactatacagagaaaaaagtgattaaagagaattgattgatttgttgttttttgaataaaaaaagctctgggggggcagagcttttgatgtatgtagaggagttgtttttgagatactatcttggaaatgtgtaagtaaaaaataatgttagtattatgagtttttattcatttttttagtgagataattgaatactttaaagcgcgaggggagatttttttttgcttttaaaattaataaatatagcctgttgacaatacacagatttacattgtaaatgaaaagaattcgcttcagccggttggggttttaggcgagattctgattggaggagatcaggtagcacgaggttatttaaataaggaagcgctaagtcaggagaagtttataacaaatccttttagagcaggagagcgtttgtacaaaacaggcgatttgggtcgttggctacccgatggtaacattgagttcatagggagaaaagacgatcaggtaaaaataagaggacacaggatagaacttggagagatagagcatgctttagtaaagcatgaagctgtaactcaggcggttgttgtagccagagagaacgagtcagcagagaaagaacttgtggcgtatatcgtttctaatattgagcagaacacaagtgatttaagagtttatttaaaacagtcgttgccggaatatatgcttccggtgtactttgttcaactcgagaccatcccattaacagccagtggtaaaatagacaaaaaagcattaccgaatcctgagggtgcgggactatcaagtggtgttgcctatgtagcgccacgaaatgagctggaagagagactggtaaatatttgggaagaagtactggaaagagaaaatattgggatcaatgatgacttttttgcattgggaggccatagcttaaaagcagttcgtctgagcaatgagtatcaaaagaaaatagcagttaatttatcgttagaagaattatttgcgcacaccagcgtagcttctcatgtggctctgatagcatcttcaaaaagagaagaattcattaaaattaaaacaataactcctcaatcggattatgcgctctcagatgctcaaagaagactatggattgtgagtcaatctgaaaaaggatcgatagcctataatatgcccgatagtatcaatctaacgggagacttcaatatcgaaattcttaccaaagcgataaaggcaacaattgaccgtcatgaatctttaagaacgatctttagaaaaaatgagtcgggtgagataagacaatgggtgcttaacagagaagaattagattttgaagtaaaatatcaagatttcagaagtgatttggctggcctggaaaaagcagcagcctttataaatgaggattcatttaagccctttgatttggaaaatggccctttatttagagctaattttatgaaagtcacagaggatagttgtattctttatttcaatatgcatcatatcattagtgatggctggtcaatgggggtattgactaaagatgtcctgacttactacgatgcatttatcggaaacaaaaagccggaattaattccgctgaaaattcagtacaaggattattcagcctggcagttagcgcaattgaacgaggtgtcttttcaagcacataaaacattctggctgaacagactctcaggagaattaccattactggatctgccaagtacaaagcaaagaccaaaagttaaaaccaacaacggtcattgtctccaagcctatattaatgcaaatcttactgataaattaagaaaatattcggaaaagaatggaggaagtttatatatagggttgttggcctcttggaatattctaatgtaccattacaccaaccagagagatataataatcggatcttctgttgccagtagaaatcaccctgatcttgaaggtcaaataggtttctattctaacacgttggcacttagaacgcagattgaaccggaagaaagttttcatgatttttttaggtctgtaacagattcaacattaaagagccttaaccatcaaatgtatccttttatcaggttggtagaagatttaaattttcatggtgatcccggtagaaatgccatttttgatgttatgttatttcttcagaataatggtgaaaaagttaatagaaatgaactaaaagaaacggaagtagaggccattacagacaaagggcatcgcgtatctaaatttgatataaacgttgcacttcaggaagtaaatgattgtgtatccctggatgtgacatttaatcccgatgtctacgacaaagacatgatagagggggtaataaaacattacaaacaattattaaatgcgctattagaaacccctgaagaaaagatttcacaaatagaatatttgtctcaccaggaaaagtatgatcttcttcattttaacgatgcagaggatttacactatcccgagaacaaaacaattatagcattgtttgaggaacaggtgtcaaaaacgccgaatgatatagcactcgtatttagaaataaaaagttcacttataacgaactggataaattatcaaaccagttggcacattatctggttgaaaattataagatcaagcctgataatttaataggggtgatgctcaacagaaacgaatggtctattgtttcaattctgggtattttaaaagcaggtgcagcttatgttccgatcgatgctcaggacccttctggcagaaaagattttataattaatgatgcctcactagtattattaatcacagaagttaattttattcatgatattgattattatgaaggagatatttttgcaattgatgtagaatttgacccggaaaactatgcttcggataggctttctgtagtgcctgaagcggataatctggcttatgtgatctatacttcaggttcaacagggaaaccaaaaggagtaatgattacttcaagagcagttgtagattatgcttttggggtattagataaaactaacattagcacatgtaagtcatttgggctcgtttctacaatttcagccgatttgggtaatacagttatttttacttcattactaataggtgcagcacttcacgttattgtcaaagaggatatcatcgatgcacataaaatgcgggaatttgatttggattgtattaagatgactccttcacactggaaagcattgcaaaccagtgaggacgtttttatgcctaataaatgtttgattcttggtggggaaccattttcagaagaaataataaaatatataaaacgcagtgttagtacttgtgaggtatacaatcactatgggccaaccgaaactacgataggtaaattaataaacaaagttgataagagtcaaaatgtagctagagtcgctttaggaagaccaattggaaacaataaggtctatattttagatgccaatcaacaacttcgtcctgttggtttaccgggtgaaatctgtattagcggagtaggtttggctaagggatacttaaatcaaaaagaattaaccaaggaaaagtttatcaataatccttttgttgtcggagaacttttatacagaactggagatttaggaaaatggctgccaaatggtgagatagagtttatcggaaggatagatgagcaagtaaaaatacgaggatataggatagaattggaagagattaaacttgcactactaaaattggatgttatagaagatgccgttttgatagtcagggaaaatcaaaacaatgaaaacgaacttgtggcctatatggtcaccaaatcagagcaaaatgggaatgatctgagagcccgtttaagaaaaactctccccgaatatatgcttccggcctactttgtagtactccagagtattccgttgacactaaacggtaaagtagacaaagattccttaccagatccactaatagcaggtattgataatggtgtagaatatattgctccccgaaacgaagtagaaaggaaaattattgaaattattgcagacattttaggaaaaaataaaagtcagataagtgttcatgataacttttttgatcttggaatcagttcattgggattaatgaaattatatgtttttattcataaagaattgaattcaaatcttcaggcggtttctgtatttgaatttacctcggttagcacattagcgacatatttaatcaatggagtacaatccaacgttgccgtgttggcaaagagtagtattgcttctgaaatggatgatatgattgatttgatttgatttacagtcatcaagtcatttcaaagaaggatttagacatcaccatacgaagactctattatgtctcagttacgaagtaagtagtttgaagtttttgtattttgagatgtaattttatttcaataaagcctgaataataatatgaataatagatctataaaaaaggatatcgcgataatcggtatgtcgggactattcccgaagtcaaaaagtataatggacttttggaagaatctggtagacggtaaggagttaatccaatttcatgaagatgaagacctggaaaaggcaggagtagaccgggatcttatccgtaatccgaaatatgtaaagggtagttgtttaatagaggagcccggaagtttcgatttttctttttttggatacacaaaagaagaagcggctttgatggatccacaaaccagaatcctacacgaacaggcttggaaaagtttagaagatgcaggatataatcctcataattattctcagaaaatagggagtttttttagtgcaagtgataatataaattggaggaattatgtatctctttccaccacattaaatgtaaacccttttttcattaagcatatatcaaatgttaactctgtaagcagattaatttcttactccctaaatttaaaaggtccaagttactttgttgatacagcttgttcaagttcattagtggcggttcatattgcttgtcgaagtttgttaatgaaagaatgcaccatggcaatagcaggcggggtaagtattggatcaaatacagctgttggctatttgtatgaggaaggttctattctgtctaaggatggtcattgtaaagcattcgatcaggattcttcgggtacagtacaaggagagggtgcaggggttgtggttttaaaaagactggcagatgccttaactgacagagatcatatttatggcgtaatccgatccacttctgtcaacaatgacggtagcttgaaggtaggttatgtagctccaagtattatcggacaatatgaatgtattgataccgccttaaaaatcgctgaggttgatcacacagctatttcgtatatcgaagcgcatggaactggtactaaattaggtgatgcgatagagatagaagcgttgaatagagcttttaattatgatacatcacatcaatgcagcataggatctctaaagactaattttggacatatggatgctgctgcaggagttagcggattaattaaaacagcactgtctttagaaaaaaaaatgttgccggcctctttgcatttcaagacatcaaatccggatattaaatttaaatccggaccattttccgtcaatgacaaattaacggaatgggagagcgataagcctcgattagcgggcgtaagtagctttggtattgggggtacgaatgcacatgcaattctggaagaaccgcctttatcacaattggcaagcgttcctacagtatatcaacttttcccattttctgctaaaacaagatcttctttagaaagttatggtcattccttgaaagattttttaagggaaaatcaaaaagtgaatatggcagatttagcctatacacttaaaacgggaagatatagccataagtttcgaaatttcattattggaaaggactctaaagaggccattgcacaattagaggagttagattttcgccagactttcaacgatagtaagcagaaagaaatcgtattgatgttttccggtcagggaagccagtattacggaatggggaaacaattgtatttgcagtatcctgattttaaattaattatagacgagggtttaagaattttaaatgacgaaacaggcgttgactataaaggtatcctggggtaccatgaagaaagtggttcagaaagagataagataaatgacacctgttatacgcaaccgctgctatttctgttggaatacggttttgctaattttttgctgaagttaggggttaagccatcacaaatgataggccatagccttggtgaatatgtagctgcctgtattagtgaagtttttacttttgaagaggggattagactagtggttagacgggcgcagttaatgagtgaagtagaacgcggtgctatgttgagcgttccgctttcggctaaagaagctattgagatgagtccgccggatatcgctatcgctgcaattaatacagagaattcctgtgttatttcggggagttctgcaagtattaagacagttgaagatttactttctgctaaaggaataacattttcgaggcttagaacctattacgcctttcacagtgcgatgatggatccaattttagaggcctacgaaagggaactgaaaaaagtaaacttttcatatcctaaatattcattcatctcctgcactaccggggaaccgattaaaaaagaagaagcagtttctcctaagtactgggtaaaacatttgcgggaaaccgtcaatttttctaaagggttagattttttattgaaagaaggcaattccatttttattgagattggatctgaaaataccttattggactttttacgacataatacgaatttttattccggtttagttttggcttccgtactcaaacatccgacagccacaaaagatgattcttattatttattaaaagcattagggactttgtggagaagtggagtacctgttaattgggatgaatattattccggtcaatcaagaaataaagtttcagcgccgacttattcatttgataaaatagtttttccagccagagtgaatccaatgcaaatactgatcaacttgtatacctctggttcgatagataagctgaataatggagaggttatttcgcaagttggccgggctttagaatcggataaggaagcgtcagagatgtttttagaaaacttagaaagaccggatatagaaactttgtatgctgaagccaaaacagaaatagaaaaagaattagcagaactatggaaatcttcctttggatatgagaagataggtgtaaatgatgacttttttgagctgggaggagattcattgaaggcaatcacattactgaaaagagttcacaaatcctttgatattgagattaccgtgggcgatttttttgaaaatagtagcataagaaaacttgcgagagagattgatttagcattagaagttaaagaattaaataaagctgagaacaaatcggcgacgtccaaccaaatacgattgtaatttatgaaagagttgattagcgaacttaaatcaaaaaatatttttttatccgtagataaagaagagttagttattgattttgatggcgataacttatctcatgatttaatctctaagataaaagataataagttagcgcttattaattacttaggaaagtatcacaacgatcgtaaatacactgaaattcctgtactttctttaaataatcattattcaatctctgatgcccaaagaagactctggattttgagccaatatgaaggagcctcagcagcttataacatgatggtaagtataacgttagagggaaagtataaattggctttatttgaaaaatcatttgataatctcatcgaccgccatgagatcttaagaaccgttttcaaagaagatgagtcaggagagatcaggcaatggatacttgaaagggaagatttagggtttacgatcgattatcaggactttagagaagaagctgataagaaagaaaaagtagaagcctatataacagctgactcccatcaggtatttgatctggaaaaaggacctttactcagagcggccttacttcaggtagaggaagaggaatattggttctacttcaacatacaccatattattagtgatggttggtcaatggaggtattaaccaaagatatattcaagtactatgtagcctgtagggaagggaaagaacctgatatggaggaattgagaatccagtacaaggattattcagcctggcagctgactcaattgaatcaggagtcatttaaggcgcatggagaatattggctggacaaactctcaggagagctgccattactggagcttccaagcagcaaacagcgaccaaaactaaaaacctataaaggtcatagcttaggcgcttatcttgacaaagcaacaacagctaagctaaagggatatgtgcaggagaatggcggcagtcttttcatgggcttactggcctcatttagccaaacaggttttacctgttgcagtatttgctcttgcgatagcaggtgcatttacaacccatgccatgaatagttattctaagactgtagatccggttcaagggtatcttagactcaacccacaaggaacctcttgtgaagagcaggatgatacctgtacgacagacaatactggaattgtttgtacagtggattataatccgacaggcgctcaattgttcggtaaaaatccagctggtaaatgtgtacagacaattttcagaccataattttattactgtaaaattgacaatgcagctccaaaaggaactgcattgttttttagattaatacttattttttctataaccattcgggttttttatttccttttaaataataatcgaaccactgttcaatcttttgggtgagatcattttgatattttttattcattaacacatgattctctcccggataaatcagcattgtattgattttgccaagacgccgaagtgctaaataaaattcaatactctgataataatgcacctgagcatcgtgttcgcctgtccaggataagagcggagtagtaactttgtgggcatgatagatcggagagtttgtcaggtaccctttataatcttcatataaagatttcccgattcttaattgcccaaattcataatgccaaaaattaggcttttgaaagctccaggtgacccaaagataaccacttacataatcagtaatcgcggcacctgccacagctgctacaaacatattggtttgggttatgatataatcagtttcatatccgccataagaatgacctgtaagacctatacgggtgctgtcaacagatgattcaccggcaatgactttttgagtagcggaaaccacacaatctgttgcggaaggtccaggatttccaatttcataaacaatatcaggcaaaaagacaaaataaccttttgaagtaaaattggtaatattaaatcctgtaggattgttcagagatggatttacatagttgtataattctttagatttcttttcgtagacaaatacaatcataggatatttagtgtccttacgataattggctggatagactaaaacaccatttaaaacaatgcccttagaattggtatagctaatgagtttggaatatccccaatggtatttaaaatgctgttgattgctttgaaaaagtactttttctttagaattttggttctctttaaaaagtaatctcgggggtaaattatagttttcctctttgtaaacatagctgtcattttttttagctcctataaattgactgatgttcatttttttgttcagtaaaggttgtaacccctttttcttgtcccaataacaataggctgtatgctccagtgtttcggttttaaacactaacttgtcatcccattgaaattgccccttattaaagccgtcatagttcatttttctggactgactgtcagattggggaatgattctatagattgttttattttcccgtccatgggtgagtcgaagcgcttttgacccatccagagcaatgctccagatatcatacttgtcataaataaaaattgttttatcttgtggtacccatccaggatttccaaaaggacttacttcttcaggctggtcagactcatcgtctgaaaagttcaccccgagttctttggtaatgtttttactaagaccactctctatatcataaacccaccaatgtttgtctttaaaatagacaagctgtttttcatatatagagacaccagtccatgcctgatcccctaattgattttgtaatattaatttccgatccccagtttgcagatccaaaatataaatatccagatgagcttcgcggtttgactgtggttcataacgcagtggattaaaaaggaaagcatatttttgatctccacttaagaacattttagggaattcattatctgtaatacggctaaaacgattctccaaaggccaccacagggctacttttgctagtctgtcccaattttcaacctccacttttgcaggatgtaaaaacgtgtcttgggcattccaaatttgtgtttgttctctattaatgggaggcatcgttttttgtaatccaaaaaatattctttttccatcctctgaaatatttagttttgcaacgggagaggaaataatttccatatccaacggaaaattatccatatctgttggattcaaagtatataacttactctctgctatgatgtaatagccgattgaagtctggtatatcttttccttactacccaaaggccgttttagaaaggctacagaatttccttttttttgccagaccaaatcagaatattcaaaatctttgtttgtactgctgatagtagttgtggttttattatgcaaattcagaaggtaaattgttgtagcattttctgtttttgtggtatatgccagaacatcagtttttggattataccaatagcgatcagcatcctttgtgataatagatataccaccattggctacgttttttaattctaattgtttttttccagtatttccctttttcaagaggattatatttttaccatctgcgcataaatcgtatcggagcaccccttgtataatctcctgtttagaagtaaacaggtcaacaattttcaactcttcttttgagttcatcgttaaaaaacaacgctctgcgataaactctcccttgtttgctccgggaaaagaataggtatttgtttctttactgtttttaacaaacaaagtatcaataccactttgatattgaacagagaaacttagccattttccattttcagagagtttgtcagcactgagataattccataatggataatcatttgctgtgagttcttttttagtatttttttggctaaatccagtaaatgaaaccaaaagtaaattcaggactaaaaagactgtttttattttatggggtaatgcatcggaattatttttcttgtatttttcgtaatatgatttcattttaatagcctgggttttggggttttagattggaatttagtgtaagttctgattcggggagcggtagtaattgatctgccggattccaacctgctttgacaggcgctaatgttgcgtccaaacgattggctctttttaaatcaaaaaagcgatgtccctgttcggtgaaaaattctactcttcgctcttttagtatagcatcaaggatatcttgtttgctcagggctgttgtacctgtaagacctgctgtagctctgatcttatccaaatcctcttttgctccaataagatctccttgttcagcacgcgcttcagaacgaatcaggtattgctcggccaaacgaaatactatggaatattctaatgaactagctgtttttgatttctgcttgtatttactgacatgataccatgtgtcggtgccttttgtaactgcttttacccaatgaaccttacgctggtctcccggttcaaatgcatttatgagcccaatacttaaagccgtgagtggcggaggtccggccttgaatatgaatgtttcaccttcctgagcgttttgtccactagtacggggtataaattgccagattgtagtactgctttcttttagaaatatggcatcaagattagtctgccaagcataggtttgtgtattgtttaagagatatgaagcggcattggcagcttctgcccattgtttgttgcaaaggtatactcgtgccagcaatgccataaccaccgatttattggggcgtatgcggtcactggaaatataactctcgggtaagagtgataccgccagttcaagatcttttataatatgagaatacaactctacagaaggcatcttatgcacttttttattttgctgataattggtggtgataatatagggtacatcaccgtagagattcataagataaaaatgaagcagtgaccttgaaaataatgcctctcctgttaattgttttttatctgcttgaggtaatgcatccgatgcgtttactccctcgataatggcattggctgcataaatctgattgtaagtgttgttccaccaggcaaaaatatctgtattggaaggcaggattgtattgttgtaaaaatctcgggttttgccggtaatgcttccatagtacactaattcatctgtgtaattacccatttgattcgataacccggagaggtttccacttagcatacccgaatctctcatttttgcatatatactaaccatagctgcatttgctgtagccttatcttcaaaaatggcacttgaagtaagctgagaagatggaaggtcaacttcaacaaaattatcacagccgtatagaagtaacattcccaacatcaataatccaaggagaaaattatggtttactgttttgattttatgttgttctataaatcgtaaaactgatttctttttcatgttatttgatttagatgattaaaaagtgagttgaattccagttgtgaatacctttagtggaggaagactcatactaaatctggattccggatcagccccatcaaaagaagtaatggtaaaaagattctgtccctgaaatatcagtcggcatttaattcctttgagcaacttatcgggaatagtataagatagagataagtttttgagacggacatatgaggcgtcggttatgatggcatcactttgataatatttataaaaggcatcgactgctgaactgtttacccctgtagaatattgttgatacgttgcattgtctccagggctttgccaatgatccgttaccgctgttggctgatttcccatgctgccgggtattcctgttcgataggatccgttgtaattcaattggtttacaaattgaaataaaaaatccaattgccagtttttataggtgatggtattttgaattcctccaaaatattttggattcaaatcacgaatagattttttatcctcaactgctgtaatggcgccatctgcattgtaatcttcaaattgataaactcctgtttgcggatttatcccggtgtaatggtatacttttttaatgtttaaaggttcaccgatgacaaattgattgttataggtagatccttcaagattaggaaaagacactaatttattgcgggcaatagtcaaattaaaactacttgtccagttaaaagattgtctttggaaattgactgttctcagagtgagttcaactcctctattttgaactacagcatcaagatttgcctgtacggaattgaatcctgttgttgctcctagcggaatcccaacaagttgattggacgagcgattgctgtaccaaccagcagttataaaaatccggtctttgagaaatccggcctctagtgccagttccagttttttattggtttcccaaccaaaatcagcattaaaaagacgtgtaggctgaaggccaataatacctccgtaattgtttcccgaagagccataggtatctaaaaactgatagtccccaatctgatcatttcctgtggtaccataactggcgcgtagtttaccaaaacttaagaagccaagattattctttacgaaggcttcatttgaaaataaccatgcagctccaactgctccaaaggtggcaaactgtcggccgggaccaaatctacttgaaccatccctgcgtccggttatatttagtatgtatcgctcattccatgagaaattcattctcccgaaaaaagcctgatatttgtatacagattcactatgcagtacattaaatacagaaaaagcggaagaaagattatagattaggctattactgctaaatccactggcttcttgtacgagctgattggttgtttgctgttgaaaagttgccccaaggagtatttctgtttttcctttacctattttttttgaccaggctaattggggctcaataatccatgattttcttgtagtagtattaacatcgataaatgagaattcgcttccgagtccataggcaggatcgtatagagtggatggttgtgtgcgactatcttcaaagcgcgtatcggtaaaaccaaaacttgttttagcacttaaattaggcacgattgtgtaggataataatccattgacaaaaagatcatgggtagttgaggtatattttccttcaagattgcttaaagggttgttccatgtactgttctcccagtttaaattaccatgagaatcatataatgccggggcatttggggggagaaaaatagcttgctgtgtgatatcaactccgggttgattattttcctgggcggtatatccgaaagaaaaattgacatggaattttttgttttcggagtcatagttaagattggcgagcaagttgccctttttgtaattgtaatctcctggaaataccgtggtttctttatgaaaattaccgcttaaaagaaattgtgttccggaagtacctcctgttaaagaggcttgtacatcgttaatgtctgaagttcctccaatgaatattttttgccaattggtatagcggttttgatcccatgtaccatttacatcataatctgttggaccataaggtataccatcgttgagaaaagcttctttacgcattttcaggtattgttgtgtattcattaaattcattaatcgggttactttacccagtcctgctgaaacatttgccgtgaaacgtgttttaccttcctttccttttttggtggtgataagcaccacaccgttagcacctcttgaaccgtagatagccgttgcatcggcatctttaaggatttcgatgctttctatgtcagccgggttgatactatttaagggactggttggaccgggaagaacaactcctgtaagatctgaacctatggcatcggaagagtaaggaacaccatcgataatataaagtggtctgtttccatcagaacgtaagctattttgtccccgtatttggatatcaaaactacctccggcgactcctgtgttttgggttatatttacacctgccattcgtccctgcatcgtagcaagcatattggtaacgggctgtttttcgatatcttttgaactgatttttgaaatacttcccgtgcgttcgctctctttaacagaatagtatccggcattcactcggacttcctgcaagattgtggtgtcgtattgaagtgtaacgtttattgtcgagcgtccctgaacaggaatgacagctgtcttaaatcctataaaggaaaagattaaaacgtcagcagcactagcctcaatgttatattgtccactataatctgatataacagtagtattggttttattttgaatggagatggtaacaccgggtatagggttggttccatcggtgagagtaccctgaatctgatgttgttggataaatgaggaactgcgccggtaggtgtttttggattgaacagatgaaaaagacagtataaatcctagaaaatataggcaataaagagctcttccatccttgtataatgaaaaattattcataatattgggttggttaattgaaacgtaagttgattagctatgatcctctgtactagtttagtcgctgtagtagaggatcattttttatgtattaaattgaatggtttatggtatcgactaccatttttgttaaatcataggcaagtgattttagttagttgagctaattaaaatttttgcggccctcaaaactatgaagattgggtgctaagaaataaagatgagggatttgcttaggaagaaaaaaaatggcgcagaaactcagcttatcgaacagaggtactggtatacccgacaacaacaagtgagcccacgccatggtcgtgagcaaaaccacttatcatctcgttgtctaaaattaccagttttctgcacgagattcaaagcgaatgcttcaaatatttttatatgaagaatcgcaaatttaatattcttaaaatgaatattgtacaaatatatataaattatttaacatacttataggtatgtgtgtattgaatataaatttggttttcagtctcagtctcagtctcagttttcagtctcagttttgaaacgaatatagattatcctcaacggtaaaatagttggggattttttttgttctaaaagcattgattttactagtcttaaagaaatatttttgttagttataattatttttcgatatttatttattgattatcaataaatttttattatttttacattgaatttttaaacctagcattatggaaattaaaattagtacccaaaccattctgaaagtattacacgtgctttcgtggattatttttgttggattatgtatcgaagccggaggaatacttaccaaaacaattgcaatcttaacgctcgatcctgctgatgccgctaaattttggaaatcggtggatttaaccgaagtgtatcagtttaatcagagtcagtacatcaccctaagcagtgttatcattattgttgctctattaaaagcgatattgttttactgcattataaaaattttcctgaacaagaacctcaacattgcagcacccttcaataatctcttcagaaattttattctaactctggcttatttatcctttggcattggtttcttttcttcctggggaatagaattagtaaaggctttgtctaatagcggtcttaagctgcaagacattcaacaattgcaaattgcaggtgcagatgtctggttgtttatgggggtaatattgcttgttgttgcttatatcttcaaaaagggaatcgaattacaggacgagaacgaattaacaatataagatatggcaatcattgtaaacctagacgtgatgatggcaaaacgaaaaatgtcattgaatgaactttctgaaaaagtagacctaaccttatccaatctttcgatattgaaaactggaaaagcaaaagccataagattcagcaccttagaagccatctgtaaagtattggattgtcagccgggggatatcctggagtttaaagaataaaaaaacaccttcagtagcaaaaactcttaagcaataagcataaaaaaaatcaagaggagatttataaattttacaaatttcatccaaaattttgcaacagctatgtggcaaaataaggccacctttgtaactgattatgagaaaagcacttctactacttctttctgttttttatctggtactgtcgtcaggctttaccacgataactcatttttgcaaaggggtaccacaggaaaccaatctgtttggtgatattccggttggtaaagtttgtccaaaatgtgtggcgaaaaaacaacaaaaaagtaaagactgctgtaaacataaagcacagtttcataaagcgaccgaaaaggtacagcaaactgctcccgctgacttagttcctaaattctttggaattgcagtaccttttcatttttacgaaactgtcttcagttcttgttcttctaaggaaaagaaaacggactattctttcttctcctctattcccattcggaataatcccctttatattttctactgcgtttaccgtatttgattttagacaattgatcgaaccgtagcatttaaagatgctatgcgatttctattgtttaattttaaatacatcctatgaaaatgcaatattttgcgttggctatgttctgtatggtttccggaaatctctgggcacagacagtaacattatccaatgctcttgaacgctctattcaaaattttgaaaaaataaaagccaaagaagccatcgttaacgcttctaaagagaacactacctatcaaaaaagccagtacttacctgactttactgtaatggcgcaacaaagttatggtacgatcaatgcgcaaaacggtcctttgtacagttatggcggactgggcagtgctgcgacctcaatgcccttacaagaccaaaactggaatgccgcttttggatccttgtatctggctaacatcaactggaatcttttcacatttggcaaaattaaaacacaggttgccattgccaaagccgacgaaaatgtagcccaaaaagatctggaacaggtaaagtttcagcatcaggtaaaagtaggtgctgcatatctgaacttacttgctgctcagcgcattaaatttgtgcaggacaaaaatctcgaacgtgctcaagtggtggaaactacaaccaaaagccgtgcagagagcggtctgattccggaggttgattattctttggcaaaagccgaagtggctagtgctaaatcggctgtgataaaggcttatgatatggaactggatcattctaaatcacttgcggtaatgttgggcgaagggtatcaggtgtatcaactcgatagcgtctttactactaaaacacctgttattctttcagagtctgcaacagaaacaggtcaacatcctatactggaatggagaaaaagtgatattctgaaaagcgaacagcaggaaaaactacagtctgcactggctttgccaagcctatctgcttttggagtcctgcagggacgcggttccggttttgactggaattatgtacaggacaataccgctttctcgaaatcgtatgccgatggtgttggaatcgatcgcagcaattatatcgttggaatcaatttaagttggaatctaaccaatatctaccgtcagtcttctaaaaagcgggaacaaaaattggttacccaatcgcttcaaaacgaatatgaatatatgaatcaggaattgattgctcagcaaaaattagcgaatgacaaactaaaaaatgcctttcagaattttgaagaaaccaaaacacaagtaatcgctgctaccgacgcttatcgtcaacacactgctttgtatgataacggccttaccaccattgttgatttaacacaatctttctacactcttaaccgcgcagagattgattatgaaattgcccaaaacaacatttggcaggccttatggattaaagctgctgccacaggcaatctgaacattttactcaacgcgatacactaaacccgaaattatgaatttaatacgttttgccttgcgcaagcccatctctatcatggtgatggtgctggggcttttattcttcgggattaaagcttcaaaagaaataaaggtcgacatcttacctgatatgaatcttcctgtggtatacattgcccattcctttaatggttatacccctcagcaaatggaaggttattttaccaaaatgtatgtcaatatgatgctgtttacgagcggtatcgaaagcatcgaaactaaaaatactcaagggcttaccttgatgaaaattaatttttatgaaggtacagacatggggcaggccattgccgaaatcaatgcgctctccaatcgttcacaggtatttttacctccgggagctccacctccgtttatcattcgttttgacgcttcttctcagcctgttggtcaattggtgtttaaaagtaaaaccaaaaccaacaatgagttacaggatattgccaattttacagcacgtccgtttcttattaaaatacctggattgacaaccgctccgccatttggaggaagtccgaggacgatcgaaatcaacatcgatccgaataaactgcgtacccatcagctaacgccagagcaaattgtggaatcgattagccgaaacaacattacatcaccttcaggtaatatttatgtgaatgatatcaactatctgacgcctacaaacaataccattaaagaggtggctgattttggcaacattcctatttttaaaaacggagttgataatgtctacatccgtgatgtggctaccataaaagacggtgccgatattactaccggttacgcccttattaatggtaccagatcggtttacattaacattgcaaaatcaggtaatgcttctacctgggacgtggtaaagaatcttaaaaaagcgattcctgccattcagaataatctaccggatgatgttgcgatttcatacgaattcgatcagtcggtatatgtaatcaatgctgtcaaaagtttaattacagaaggtgttttgggagcaatgttaacgggattaatggtgcttctgtttttacgtgaccgcagagccgctttaatcgtagtacttaccattccgatctctattatttcgggagtattgttccttaagttattcggacaaagtatcaacatcatgtcactatccggactggcactggctattggaattttggtggatgagagtaccgttaccatcgaaaatatccaccagcatttagccatgggtaaaacgaaagccaaagctattttagacgcctgtaaggaaattgcgttcccaaaactattgattttgttgtgtattcttgcggtttttgcaccagcctttatgatgaccggtattccgggatcgttgtttatgcctttggctctcgcaattggtttttctatgttgttgtcttttatgctgtcacaaacgtttgtgcccgtaatggccaactggttaatgaaggacaaagaaaaccatgagcataccgaagataaattcgacggattcaaaaatcgtttcgtgctgtttttacaatccataatgggcaaacgcaagcctattttaattgtcagttttatcctggttgcagttggagcatttttaatgtacaacagtaccggtaaagacgtattgcctactgtaaattcaagtcagtttcaggtacgtattaaagcgcctgaagggactcgtatcgaaaaaacagaactcaaaataaagcaggttttaggtgaactggaaacgattatcggtaaagatcatattgccatatcatcggtatttattggtcagcatccctcctcttttgcagtgagtccaatttatttgtacaatgcaggtccgcatgaagccttaatgcagattgccttgaaagattttgacggaaataccaatgagctgaaagaaatcatccgcaagcacatgaagcaaaagatgcccgaactgcatttctctttcgagcctatcgaacttacggagaagattctgagccagggaaccaatactccgattgaggttcgcttctcgggaatgatgaaaaaaatgaacgtgatgtatgccaataaacttttggccaagctaaaagaaattgattatttgagagatcagcaaattccacaatccctaaactatccggcatacgaaatcaatatcgaccgaataagagcggctcaactgggtatcgacgcacaagacatcgcgcgttctttggttcctataacggcctcttcacgctacactagtaaaaacatgtgggttggcggaatgatgggaattgcctacgatgtacaggtacaaaccccacaaaacattttaaacagcaaagatgagttgatgaatgtcccgttaggaaaaaactcagaccgacctgttctgggtgatgtggcaacaattacgcctacaaaagtattaggtgaaagctacaatctgggaaccatgggttacacaccggtaacggcaaacattcataatactgatttaggaagagcacagaaagacgtacaggctgctatcgattcgcttggtgaattgcctaaaggagtcaatatacaggtatccggaatggttccggtgctcgaggaaaccatgaatagtctggcaacaggtttactgattgcagttattgttattttcttaatgctaacggccaatttccaatcgtttaaagtgtccttagttatcctgaccactgttccttttgtaattctgggttctttgattctaatgaaactgacaggttctaccctgaacttacagtcttatatgggaattattatgtctgtcggagtttctattgcgaatgctgttttactgattagtaatgcggagtctctccgtttagaaaatggtgacgcccttaattcggctattcaggccgcagctttgcgtatacgtcctatcattatgaccacactggctatgattgcaggtatgcttccaatggctattggacacggagaaggcggtgatcaggtagctccattaggaagagcggtaattggcggactaattgcatcttcatttagtgtattgatcctattaccactggtatttgtgtggatacaaaacaaaaccactacccaatcaccatccttagatcctgaagacgaaaacagtattcattatataacgttagaaaaataaaccatgaaattaatctattatatccttatcggaattgcagttgcatcttgtaattcagaaaacaaaaaagaagagaaaccggcagccatgcccatgatgatgatgcagaattttgaaacggtttctctaaaaaagagcaatccgaaggttcctctgaaacttgccggagaattggtttccgacaaagaaacggccatctatgccaaagtaaacagctacgtaaaaaaactgcatgttgacattggttctccggtaactgtcggacaaatcatcatggttttggaggcacccgagattcaggcacagctggcggcagcaaaatccaaatggaaagcacaggaagccatatacattgctaccaaatcgaattatgaccgaatgtttaaagccaatgaaactaagggcgctattgcaaaagatgccttagaccaaatcaccgctagaaaactatccgaccagtcacaattagaggctgcaaaatctgcctatcaggaaatacaggccatgaatgattatctgatcatccgggcaccttttaacggaattgttgctgaaagaaatgtagatcccggttcttatgtaggtccaatgggtaaaggttccgacaaaccgttactagtgcttcaggacaataaaaagctgcgtgtgtcactttctattccagaggccaatactccttatttgaacttgggcgattcgataaattttaaggtcacctcgcttccgcagaaaaagtatagggctaaaatttcgcgtaaatcaggtgtcttagattttaaattacgttcagaacgcatagaagctgatattctgaaaatacatcccgaactgaagcctttgatggtggtggaagccatgctttcgttacaagccagtgaagcgacattctttatacctaaaacagctttggtagaaagcaatatgggaatgtatgttattcaggtgattggtgggaaaaccaaaaacattcccgttgcgaaaggacgtgcactgatggatcagattgaagtgtttggtgcactaaatgaaggcgacaacattttaatgaaagccaccgaagaaataacagaaggaacaaaaattaaaaaataaaacaatgaaaatacttggccgctatttccttattgccgcactggcagtagtattgatctcgtgtaaagatcaggaaaacaaaccgcagaatcaggtttcaaaccaacaggagttaaccgtaaaagacagtactgctgtttcagaaggaactcctgtacccaatgatgaagtttgtatggtaaatgatctgcatatgggtaaaaaacaaattgaagttccgtttggcggaaaaatgtattacggctgctgcaatatgtgtgtagaacgtatcccaaacgatgaaaacgttcgtcaggcaactgatccacaaaccggagcaaaagttgacaaagcttcggcttacatcgtttcgctgaacaaacagggaaatgtagcttactttgaatcggaagagaattatcagaattttattcaggccaacaaagaactgaaaaaataaaacctgaaaaacagattcacttttcgagtgagtataccaaaagggctgtccgaattatcaccggacagccctaacttttttaagctaaaattcacttatctaattctgttaaagattaaactttatcttttaaactgaaacttacagatccgtataaagtgaattaattataaaatataaatcaataaaatacaaattattataatacatgggaacctttgttgatttttaagtaaaaaacgcaaagttgtttatggttaattacttatatttgttcacctaaaaataaccaaatagtgactcatatcaataagttaaaaatattcaatgatcccatttatgggtttatctccataccgaacgaacttatttacgatttaattcagcacccttattttcagcgtttacgccgtatttcgcaaatgggtctgtcgtatttggtttatcccggagcaaatcatacgcgttttcatcatgccttaggctgtatgcacttaatgcaaaaatcagtagatacacttcgttttaaaggagttgcaatttcgactgaagaagagaatgcgttatatatagccattttactacacgatataggtcacggacctttttcgcatgccatggaaaagagtatcgtagaagatgtgcatcatgaggccatttcattgttgtttatgaacaggctcaacgaagagtttgaaggaaaactaagtctggctattcaggtttttaaaggcgattaccaccgaaaattcatgttacagctgatctcaagtcagctcgacatggaccgaatggattatttaaaaagagacagtttttatactggtgtagccgagggaaatgtaaattctgagcgtttgattcagatgatgaatgtagttgacggtactttggtaattgaagaaaaaggaatttattctgtggaaaagtttctgctttcaagaagattgatgtattggcaggcttatttgcataaaacaagtctcgtggcagaattaattttgatgaaggtactaaaaagagctaaagaacttactctaaaaggcattattctgccgtgcagtgagccgcttttgtatttcatgaagaacagagtcactctggaggattttgatgctgaaaaattagacctattttctcaactggatgattttgatattattagcgctttaaaagcttggcaaaagcacaatgattttatactttctactttaagtaaaatgcttattaatagagatttacttaaaattaagcttaccgcagaaaaaatacctgtcgaagaattacaatcgctgaaggaagaatttgctaacgaacaccatattacacaattagaagccggttattttatttttggtggaaaaattaaaaatcaggcttatagcaaagaagctgaacccatacgaattttgaaaaaagacaaaacaattgaagatgttgtagaagcatctgaccaattgaatttgaggtcattatctaaattggtaacaaaatattacatctgtttcccaaaacaacttatctaaaattaacatttaaaatctattttttatatttttgtcgcaatgaaatttacagcagaacaaatagcgggaattttagaaggagaagttgttgggaatcccaatgtagaagtttctcggttatctaaaatagaagaaggtgaggagggatcgcttacttttttggccaatccaaaatatatcaatcatatatataccacaaaagcatctgtaacaattgttaatgatagctttattccggaacaggaaatcactacaactttaataaaagtggaagacgcttatgcttctttctctaaacttctacagttttacaatcaggttaaattaaataaaaatggtatagaagcacagtcttttataacagaaggaactaaatatggagagaatttatatttaggaagctttagttacattggacaaaacgtggttctgggcgacaatgtaaaaatttatccgaacagttttattggagataatgttgttattggcgataatgtgtatatttttgcaggcgctaaaatttattccgaaactataattggtaacaattgcactattcattccggaactattattggtgcggatggttttggttttgtaccaaatgacgaaggagtatacagtaaggtaccacaaattggtaacgttattattgaagacaatgttgatattggtgctaacactaccatcgacagagcaactcttggttcaactattatccgacaaggagttaaattagacaatcagattcagattgcgcacaatgttgaaattggcaaaaatactgtaattgcagcgcaatcaggtgtggccggttcaactaaaattggcgagaactgtatgattggcggacaagtaggtatcgcaggacacttgactataggtaacaatgtgagattgcaggctcaatcaggagtagcaagaaatattaaagatgatgaaatcctacaagggacaccgtctcttggttatactgattttaacaaatcgtatgttcatttcaagaatctgcctaaaatagtttccgaaggagaagaattaaaaaaacaaataataaacccaaaaaatggaaataatggttaaacagaagaccatcaaaaatgaaatttcactaacaggcgttggattacacactgggaaagaagttacaatgacttttaaaccagctccaataaataatggtttcacttttgtaagagtagatttgcaaggtcagccggtcattgaggctgatgctaactatgttgttaatacgcaaagaggtactaatttagaaaaacttggcgtaaaaattcaaactcctgaacatgttttggcggcattagttggatgtgatcttgacaatgttattatagaattagatgcttcagaacttcctatcatggatggttcttcaaaatattttgtggaagcaattgaaaaagctgaaatagaagagcaagacgctaaacgtaacgtttatgtagtaaaagaagtaatatcatttacagacgaaacgaccggaagcgagatcttggttatgcctagcgacgattatcaggtgactacaatggtagattttgggactaaagttttagggacccagaatgctactatgaaaagtatagccgattttaaaaatgaaattgcaagttcaagaacttttagtttcttacacgaattagagtcattactagagcacggtttaattaaaggtggtgatttaaataatgcaatcgtatatgtagacaaagaaatttcggaatctactatggcgaatttaaagaaagctttcgggaaagatgaaatttcggtaaaaccaaatggtgttcttgataatcttactttacactatccaaacgaagcagcaagacataagcttcttgatgtaattggagatttatctcttatcggagttcgtatacaaggaaaaattatcgccaacaaaccagggcattttgtaaatacacagtttgctaaaaagttagctaaaattatcaagattgagcaaagaaatcatgtacctgtttatgatttaaatcaggaacctttgatggatattcataaaatcatggcgatgcttcctcacagacctccattcttgttgattgacagaattatcgagatgtctgatcgtcacgtggttggtttgaagaatgtaaccatgaacgaaaatttctttgttggacatttcccagaagcaccggttatgccgggggtattaattgtggaagcaatggcacaaacgggtggaattttggttttaagcacagttccggatcccgaaaattatttgacttactttatgaaaattgataatgtcaaattcaaacacaaagtattgccaggtgataccttaattttcaaatgcgaattgatttctccaatcagaagagggatctgtcatatgcaggcaaatgcttacgcaaatgggaaattagtgaccgaggcagaattaatggctcaaattgcgagaaaacaataataattaatcaattttattgtttaggtttgttgcccaaattagactattttaatttaaaatataaaaaatacatatgaatcaaccattagcatatgttcatcctggcgctaaaatcgctaaaaatgttgtaattgaaccttttacaacaattcacaataatgttattattggtgatggtacttggattggttcaaatgtgacgatcatggaaggtgcccgcattggtaaaaattgcaatatttttccgggagcggttatttctgcggtaccacaagatttgaagttcggcggagaagattctctagctattattggagataactgtacaattagagaatgtgttacgatcaacagaggtacagtggcctccggacaaactattcttggaaacaattgtttagttatggcttacgctcacattgcacacgattgcgaaattggcaataatgccatcattgtaaacggtgttgcacttgcaggtcacgtagttgttggaaaccacgctgtaattggtggtttagcagcgattcatcagtttattcatatcggagatcatgctatgatttcgggtggatcattggttagaaaagacgttcctccttatacaaaagcagcaaaagaacctttgtcgtatgtagggattaattcagtaggtttaagaagaagaggtttcagtactgagaaaatcagagaaattcaggaaatctatagaattttataccaaaagaattacaacacgacgcaggctttaagtattattgaagctgaaatggaagcaactcctgaaagagatgaaattctggattttatccgaaattcatctagaggaatcatgaaaggatattccggaaactattaattttagagtttagatttctgattttagatttctaagttgaaaaaattgaaaattgaaaattaaaaatattaatataaaaatgaagatttattctatagctggaatctaaaatctacattctaaaatctaaaataaaaaaatggcatctacatcagatattagaaacggattgtgtattaaattcaaccacgatatttttaaaattgttgaatttcttcacgtaaaacctggaaaaggacctgctttcgtaagaacaaaattaagaagtttaacatcagggaaagtattggataatacattttctgctggacataaaattgatgttattcgtgtagaaacgcataactaccagtttttatatgctgaaggtgatgagtttcattttatgaacacagaatctttcgagcaaatctctctaaataaaaacattttagatgctccgggattattgaaagaaggaacaagtgtaatggttcaggtaaatactgaaactgacttgcctttatcagtagatatgccatcttctgtaattcttgaagttacttatgctgagccgggagtaaaaggaaatacagctacaaatgctacaaaaaacgcgacagtagaaactggagcgtctgtaaacgttcctttgttcatcaacgaaggtgataaaattaaaattgatacagcttcaggttcttacatggagcgtgtaaaggagtagtttttatgagttttcagttttcagtcgcagttatcagtttgttaatgcagactgaaaactgagactgaaaactgagactgaaaactaaaaaaatatatgaaatttccaaagagtcattctttacaagaaattgcaaatttgcttgactgcgaatttattggtgaccaaaactttcctgttttaggcatgaacgagatacatgtcgttgaagccggagatattgtttttgttgaccatcctaaatattatgacaaagctttacaatcggcggctactatagttttgattaacaaaaaagtagattgtcctgaaggtaaagcccttctaatttctgatgatcctttcagagattttaatatcttaaccaaacacttcagaccatttcaaggcaccaatgtgtcgattgcactctctgcaactatcggagaaggtactgtaattcagcccaactgttttatcggaaacaatgttaccattggtaaaaactgtctgattcaccccaatgtcactatttacgatcataccgtaattggcgacaacgtaatgattcatgccggaactattttaggagccgatgctttttattacaaaaaacgtcctgaggggttcgatcagttaatttccggaggaagagtagttatcgaagacaatgtcggcataggagcgctgtgtacaattgacaaaggtgttactggtgataccactattggtgaaggtacaaaattggacaatcaggtacatgttggacatgatactgtaattggtaaaaaatgtttaattgcttcacaaactggtattgccggatgtgtaataattgaagatgaagttaccatttggggacaggtaggaacaaccagtggcattacaataggagcaaaggctgttattatgggacaaacaggagttaccaaatcagttgaaggaggaaagtcttatttcggaaccccaatcgaagaatcgagagaaaagttaaaacaaatggccaatatcaaaaagattcctgaaattctaaataaattgaagtaattatgtctataaaagaatttgttcaaaaattttacaagtcagatgccttaattgatagcgaaatcatgaaagcttacttacatcccgaagtaaagttagactggaacagcactaaaggactaatcgaaatggattacgattctatgatggctatggcaaatgagcttagtcgagcttatgttcgttcgaaggttagaattagccatatcattgccgaagaagacttagtttcaatacgatattctcactttgtaaaaacgattgagaaccctagagaagagatgttattagctcattttgccacaatttggcaaataaaagatgataaattatatcgcggttatcaaatgagtcaattttcttaatttttttaaagacaaaaaggttaaaatacgttacaaaaccttacttttgcatcacaattttaaaaactacataaaatatatatcatgagtgttttagttaataaagattccaaaataattgttcaaggatttacaggtagcgaaggaactttccacgcttctcaaatgattgagtacggtacaaatgttgttggtggtgtaactccgggtaaaggaggaacaagccatttagaccgtccggtttttaacacagtaaaagatgctgtagaacaagccggagcagatacatctatcatttttgttccgccagcttttgctgctgatgcaattatggaagctgctgacgctggaattaaagtaattattgctattactgaaggaattcctgtagcagatatgattaaagctaacaactatgttaaagaaagaaattcaagattaatcggaccaaactgtcctggtgtaattactccgggtgaagctaaagttggtattatgccaggttttgttttcaaaaaaggaacagttggtatcgtttctaaatcaggaactttaacttacgaagctgctgatcaggttgtaaaacaaggtttaggaattactactgctattggtattggtggagatccaattattggaactacaactaaagaagcagttgaattattaatgaacgacccagaaactgaaatcatcattatgattggtgaaattggaggtcaattagaagctgatgctgctaaatgggtaagagctgatggtaaccgtaaaccagttgttggttttattgcgggagaaactgctccagcaggtagaacaatgggtcacgcaggtgctattgttggtggttctgatgatactgctgctgctaaaaaacaaatcatgagagacaacggaattcacgttgttgattcgccagctgaaattggtaaaaaagtaaaagaagtacttggataattccgggtatttaaaataataaattccaaaaaagtctcaatattctgttgagacttttttacatttaaagtcttgagggataaatcaaaaaaacttagcatcttagcatctcagcatcttagtaacttaaaaataaaaatatgtacaacttaaagaaattgccttaaattcaatttttaataaattaacaagatatttaataccactttaaaagtaattaaatataatcctaccatgagattcctgcttataccctgtctttatccccttttaaaggcaatgacattttaagaaaagtgaaatgacattctgaacaaagtcactccttctatgccaataccggctacttcaatggtttaaaaacaatttcgtaagacttggctttgtttagaaattcattagcaaactgctgaatgtctttttcagtgatgctatttacaatagctacataagctgcaggattatccatgtttatattgtactcaaaaaaattgtataataaactcaaactgtagctgttaaaatttttgctatcttctcttgatttcaagtagttgcttttggttttcgccaggtcctcttttaccaaaacgccatttttaattttgttaatttcgttgtacactataggaagtaaactgttcactttgatcggatctgaatcaaaatttatcgatagagcaaccgtattttttggaaatctcgaagctgctgcactgacctgaacaccataagttcctccttccttctctctaagattctctgtatagcgtaaagtcaaaatgtcacgcagcatatccgccaaaacagcatttttggaagtgtatttaaaatcgctttcaaactgaatattgaccgtacttttgggcgtttccattttaattaaaacttctttgttaattttattagaactccaaacaggtgttttgtctttgaatgtttcatctctttttataccgggaatactggcgatgtatttttctaatagtggtttcagtacttccgatgttacgtcacctacgataaaaaactcaaagttagaaacatcacaaaatcgctctttataaattgcttctattctttcaaaagacaaatcatcaataaactgctgatccaaaattcttactctgggattatttttcccgtaaacgattgcattgatactatcggtcatttttgcattgatatccttgtctttgttttccaggtaattttgaagatctaatttcttaatatcataaatttccttgtcgaaacgcggctttacaaaacgcagatgcaccaattgcagcattgcttcgaggtcctttactttggcattacccgaaaccgtctcatttaaatctcccacatttattcccgtaccgaccacctttcctgaaaggattttttccaaattaatattagaaaatgctcccacacctgaagcatctgtcaaaccgttcagtgcaaatgtcgatggcagatctttgagatcatataaggacgcccccccgaaactttccgcatacaactgtacatcatttacatttttattggcaaatttataatgcacctttacgccattgcttaaaatataagtagtagctccgatttctttactttccttttcagcagtaattttacccggaacaattgttacatcagtcaacagtgacttatcattaaaactgtctgtataaggctttaaattaggattgttttctgatttggtaataatagcaaaagcgttctcctttgttaaattggtttcattttccatcccttcaacagtcactactctgttttttgaagtatatccacgagttaattcgacctgaagagcttttgaatcgatttctttcaaaatagattgtatcatttcaaactcgcttttagtatctgtaaacagtcgatgtaaaagataatctgattgtatactattggcaatactactatgtgaaacttctttctctgattggatatagttttcgtaaaaagaactaatgaaagttacttttctttgaatttcaccttccgaaaaaccaaattttccggcacgtatatactcatccacaactacagctaaagcttctgcctgtttatttggttttggagcaatatccatccccattacatcattcattcttttaaaattagaataataagcctccgcatttttaaacggacagttttctttctgtgctaattcattcaatctgtcgttgagcatcgaaaacgccattatcctcgttattgactgctttagatcagcaaaagtctgactctgacctgcgccattttgaatgattttaaaagatatagccgaatttgtgatttctttatcgagtgctaacttaaaaaaaggttcctcatgatccggaattgcgacctcaaaacgttttttcgggtttttagctttcggaatatcagcaaataacgtttttattttttgctcaatttcttcagcatttacatccccaacaaccgcaattgcctgcaaatcgggacggtaccattctttgtaaaaatctcgtagcaaagtgtaatcaaaatgttttacaatatccatatcaccaatagcaacacggtttgcatacagcgaatggttgtacaaataagggttgaataagttagaaatacgggttgatgcgttttgcctggttctccattcttcaacaataataccacgttcggcatcaatttcctcattggtcagtagtaatgaatgagaccaatcgtgtaaaatcagtaatgcagtatcaattactttaggatctgttgatggaatattgtcaaaattataaaccgtctcatcaaaactggtgtaagcatttatattatttccaaaaacagccccttgtttttcgagagtcgtcaaaatttcttttccgggaaagtttttagtgccattaaaagccatgtgctccagaaaatgtgccaatcctttctgattgtcattctctaaaatagagcctacgttttgaataatataataacttgctgtgtttttatttaccgctgttggataaatataatacgtcatgccattggatagtactccttttttaagagttttatttccaattaagacatcagcagatttgtagttttgcgcatttattgaagcaactccaataaataataatagtaagtgtaaaagttgagcgtgtacagatttcatcatttttgatttcggcatttaaagtaagaatatactatcccacatcagttgaaagtatacgtattcgtcctacttagaagcatctttgcctaagaacggataggattctttttcagttcatctgatcatggtatgcgcaaaataattaaaaatgatgtaccaaaaaatttgcgttacttatttaacacattaaatttctgtgcgacactcgttctgctccacctatttatacttgagtcaccatccaaaattttttaaaatcgcactttatagctcacccccgctgtccatgctcgtgtaagtccgtccggtctgacttctctcactacaaaaggcgtcgcaaccgaggcttcgatactacttccggacgaaaaatgatatcctgcaattagatttccattaatggttagtccgtcagagcctttaatcgtctgtctttgtccgtaaatatcttcataagtatcttcccctaaatgataaatcaaaagcaaattcggcttgaacgaaaatttgcgattggctgtatttatggtgtaggttccgcgcaacagaacgtccggttttctctcaaataaattggtggtcacaaaatcatcagtaccggaatattcgctgaaataggaattcttgtttatattaaagaccggcaattgtatcgcagaattaaaatcccagtttttatagttcagattcacacttcctaaaaaatcaaaagttccaagactgctttgataatccattggaagcggatgatcgtttattttgagattactttggttaaacggaactttaatccccgaagtaaaactccatttgtacaaatttgtcgtaacgggagtatagtttgccgttaaaaaagcatctccaaccgagccccttcctccaaaacttccattggcatactgagaagtcacttttacatttcctgaccattgtttattaaaactcctggtgtagccaatataacccgacaaatatttcacatccacatcaccttttcccagaacagttccaaattcgatatggttgttcttcttgtcatcattttcgtgaaatgctcctccaatactgcaaataccggcatcactacagccttgtgcgttactataattgaatataaaaaatgaggctaaaactatcaaaaaattaattttcataataagttggattttaaagcagcagtagcaaaaagatgattgaattgctgacaatgaattaatacataaggatgaaccgttaaatttactcctgccggaatcgtataggtctgtgaatttcctgttcctaagcttcccagatttacaaaactgtccggtcgattggttttagaaagataaaccttaagatcaggcccactggaaatgctaaaatctttaagtgataatttgtacagatccccttctttgtaaattcgggcagaaccggtaacggtattgcccgactcagcttcaaaagttcctgtagaaagcaaaattgcttctgaagaaactaccattgaaccaattttttcgcgggtcagttctccttcagattcacagctgaagagtattaaaatagctataaaagaaaaaattgttctcatgtgatatcgtttagtaattcgaaattagtaactcttacactctcctaatgtcggctagtttacatatcctgaacatttttgatattctccgtttgtattttacattttctactgcctagatcaaaaaaaacaccaaagcgctccgttatatttttttacctttacctgttataaaaaatcatttaacagatagaaacctatttcttaaacatagaagtctctgtgtattttaaataaatgaagcgccttttttgtgagtgttaaatctatgtttctatgcgtttaaaaataattacatccaacgggttacttttatatccattataccaatcgagatgacaattcaacaattaaaatatattgtagcattagacgaggaacgtcattttgcaagagcagcagaagtttgcctggtatcacaacccggactaaccattcagctaaaaaatctggaagaagaaattggaattaaaattttcgatcgaaacaaggttccgttaacccctaccgttcttggaaccgaaattataaaccgagccaaaaaaatacttcgcgaggccgacgaaattagagattttgtggtgaatgagaaaaacaaactagaaggcgaagttaaagttggaatcatttcgactttatccccttatctgataccactttttattcaggccatgaaaaaagccactccaaaaatgcaattcattataaaagaagccaataccggacaattgatgaatgatgttatgacaggagctctggatgtagctattatggcaactcctaccggaaatcctcatttaatggagcatccggtttttaaagaaccttttgtagcttacctaaatacggtgcatcctatggccacagcatcacattacgaattgcagccctcagaccgggccgaattgcttttgcttcaaaacgaatattgttacaatgcgcagctgcttgatatctgtgatatcaaaagtacaggaaaaattaaagagcaattcagttacgatattagctcgattgaaacccttaaaaatttggtacgggccgaattaggattcgccataatccctcaactttcgatgattaacgaggtagaaaccgggctttttaagcattttaaagatccaaaacctgtacgtgaaatcagtctggtggtgtctgatactttttctaagaaattattgcttgaaaaaatgaacgaagccatctggaattgcttaccggaatctttgcagcaaaattttgcttaccgcaaaataaaatggaacgactctccctattttattaaagctaccacccgataaatagctatcgggaatccatacaaaaaaagccaaaataccttgcagtactttggcttttcgtatttagaaaaatgcttcaattagtaagatcaatgggaaaaaaaatacatcatcaaattaaaataatctaaagttctttcacgcagattctgcagattgtgcagattctataagattttattaattgctccgcgtacatctgctcaaatctcttttaaatctgcgggaaaccaaaaaaatacatcatcaaattaaaataatctaaagttctttcacgcagattctgcagattgaaacagattctataagattttattaattgctccgcgtacatctgctcaaatctcttttaaatctgcgggaaaccaaaaaaatgaatcatcaaattaaaacaatcaaacctattttctcgcagatctcgcagattgtgcagattctataagattttattattttccgcttagatctttagctgcaccaataattacgtttgccacagcttccggttgtgagataaaaacacaatggcttccttttacttctgtcgctttcgttttggaacgtttgtacatagcatgctgaatggaaggatcgatacttttgtcctgtgtagcaattactgcataagccggtttatctttccaggctgcttttgtaataggtgtgataaaccctttggcataaaaagcaccttgcgaagcgtacataaaagcggcatcttccttgctaatgtcggcacagaaaccggcatgaaacttggcctcatcgtaatacacgatacctttatcatttggagccaaaacaccattctcgggagcgggagcggctgtttgcagccattgcaaagccgattctccgttatccggctgaaaagcggctacatataccaatcccacaacatttgggtgattcccggcctgcgtaattacagcacctccccaggaatgtcccactaaaatcgttggaccaacctgattgtccaataccatattggttgctgctacatcgtcttcaagagagcttaacggattttgaacaatggtaactttatatcctttttttgaaagtacatcgtataaatttctccatccggagccgtcagcaaatgctccgtgaaccaatactacatttttaacttttgccggtgcagtttgtgcaattgaagtggcagatagtaagaaggtcaaaattaaagcggcagacatgaataaaccattcaattgtctttttaaatttattgttttcatttttttatttttttaagatgttgtttgttagattcaaatagtctatttaggtgtaattaattctaacacatagtaacataaattttgtattttcaaaaaggacgtttcacttatttttaatacgcagagtagtctttgtcaaagaaatttatttctttataacatgctctgctactcctaaattctatgtccctatgtgtttgatatattgtcagatacactactaaatatttttttttaagacagtaaagacacgttcaaagcgatctctgtattgagcagttttgaaataggacaaatctcttttgctttttgagctgttttctcaaaatcttctgtagtaatccccggaaccgatcccgaaagttcaagtgtaattaaagtaattgttccatcttcaaaagttactttggctgtagtatttaaatcttcaggaacaaaaccggcctctgataataaaaagctcaattgcattgtaaaacatcccgcatgtgcagcagcaatcaattcttcagggttagttcctactccttccgcaaaacgggttttaaaagagagttgagcattgtttaaagtagtactttgagtgctgatggttccttttccttccatacctgttcctttccagttggcatgtgcttaggactgtcataataaaatttccaaaaaatatgttttcctacaactacagtagctttgtgcaatactcttccgctattacgacctgttcctaatgattcataataatctatatctttctttttattagaactctgccaaatagtatcttctgttgggtgaaaattgaaaatgtcatagtaatcatttttaggtgtgatttcacttttattttttttaaaagggatagttgctaatacttcctcttttgttttgtcatgtaatctaccttcaggcgtagtatgtctatttaattttaatacgccgttgctgtcaggtttatattcactattatttacaaatttgacccataattctcttgtaatgtgtattcctccttcattacctgttttaggatgtggtctatcacttattactcctcgatcagcaaaatcgattccgtcccacaatacagctccttctgagtaatctttttttccttgtaaaacatgaattagtcctttacgtgcatttttgcaaagattatcattttcggtatcttttaatgattctttcgattttgctgttgaatagcctgtagaaagaagtttttttgcaaatttgccttgttcttcaatagtcagtttttctcctttttcaaatttaacagcattaaaagttgcttgagtggttgcggcggcactttcaaaagtacttgaatcctcagattttattactccggcaatatagcaaaaaatttcatgtgttatgtctaatttacttacatttaaaaaagtgtctttttcatttctttttccgtcgcaaacgtacacgtcattgacacttcctttattcttcgtagtatttatttttccctcaaaagttccatctttattataaaaatgaccatttacatttacaataggatcaaaaagtatatcctcgacctgatcaagtataagtgaatcgccataaggttgtgtaaggttatttagtttgatatactgattcatgacgatttcatttttatcatcctcaatctgctggcgccaaatactcagcatgatttgcctgaaccttgccatttctgaagtactggtatctttaagttctatagtatggtttttaataatcattgagatagtttttaggaaagggcaaaaaggtgtttgttacaaaatttcgacttttacgggttttggttggatatggtctgagaatgcagtagtgatattgagacgcaaatcgtcttcttgttcgattttggcatcaccacccaggtaacagtttttgaataatacttcgagggctttaaattcgtccatttttgaggcttgtaatacagcagaacgaatagcgatatccggttttttgaagtaggcaaacaatgtggtttcgtcatcgtcagcaatggtgagtttaactacttttttatgtttgtgtttccattggttgagctgcgcttgggtaatatttccgtcaagaatgttgatgctttttgctttttctatttccatttttgagaacttttgtttgtttttatgataaggtggttgatgtcagatttagggaggcggttagaggaaccgactgatttgttttctatgatttatagaaactgaattatttaagggagtaaaaaaagaggctgcctgagttattgttttggagttgaataggctcatagcagcctcctgaagaagaatccctgtttaaaacggactaataaagagcttgtagaataagtttgctggcaaaaatcatgttctttgaactccttttttgcataacgcagttgaatattgggtttctctttgaagtcggttttagagacagggaaagggcattatagttttaggaattgatcaggaggattaattccattcaacatgagaacagattaagtcaaaagaaactgcgattttggtatctccctggctaattcctctactattagagttgaattcacagtttcttactgtgtgagtgattacttcgttgctatcgtccaggtaacttacaataatgctgaacggattaatatcctgcaatctttgcccttttggtaaagcagccagaatggcttctacttcgtagttgtataaagtaatggaagctttggcctcatattttcctctacctctgtgtacaggcatatcgccggctccgtagtggttttcttttgatactgagtcgctatagttgacagcggtaataccggtaacaatgttacctgcgatacttacttcgattgatgaccagctgtgttgttgtccgttaattaagggtaacttattcatatgtttcttgattttttattttataattctgataacgctccaagcctataatcggattcagtcattatttgagacgattgaaagacgacaatatcctgatgagattttattgtttttgagagataagaaaagcttaaattatgctttgtcgattccgaaaggatttttgaaacctaaatcaactttgattttacgggcagttccaactggtgtaatttcggcttttacttttaattctgaagttgccaaaatgttttgttttggatctacatacacatcaaaagcagatacttcctgattggctaccattccctctaaggcacttctgcataatccttcgaaactttttgaaaccgattgtggtaatttaccatcgatatccactaaaaccggtgaagctaattttggtagtaaagcggtacgtaacaaacgggttgctttattgatggtacggttgttttctacataagcataatcagaggtgccggtagtgcaagtgtggctgtcgttgaaataaagacccggtaagccggtatgtgttttgacaaaaatgtattttttttcatttaaggttcttgaatctgcaagtgatttaattggctgtcctccaataaaacctacctttgaaaaaccttcaccggtaagattgaatttttcgatccaggcaatgttctccgatacttttgctctggaaacagcacctaaggccaatccaactgctgcggtgtttttgtatacatctttgaaagtgaattccagattgaccccatttgcttgtttcaagcctttgtcatcacttacgttataaagattggaagaatttcttacttcaactagactttcgttagcagccaaagcatacaatttgtcatcttctgttgtggcacctttttgaaataattttttttccagggctttttcaacatccatagcaactacaacagatacattttctgcttttaattcagccaaattggaagctgtatcaggatcaaacccctttccttctagaataacttcaaagggcatgaaatctttgtaagcaagagctgcttgtgtttgtgctttttttgcagcagcctctgtttgtgcaaatgtggtggttccggaaaaaataattgccatttggcgaatattcccgtttgcctgttcctgcatagccattgctttttcaacgatattttgataagcatctcctccagtgatcataatatacaaatctcccgatggattcatcctgaaaaattgttgaatttgatagtaggccgattgtccgtttacgtcataatcaactgtaattcctaaagcctctgcatcttctagtgaagccagacgttttattttttcaaaagctaattctgaagttggaattccgtcaaaaagtaatcctgaaaccatgtcctgttccggagttcttcttcctaatccgcctgatagtttggtaatcactacatcgtttaatgtactcataatatagaatgtttaaatgtttaaaatttgttttttgtttaaaaaagggcaaaaagaagcctgtgataagttgttaaacttctcgtttttagttaattgttgttttgaaatagtattcgtaatctaagacccaaaaagtagaaaagatgctttttggaagtcaatacaagtaggattgttaccttagattaggagtgaatttgtagtctgccggcgagtacaaatttaaggctcaaagtgtgtttttccaattttttggatggtcaaagccagtagtttcagtctattaagcgctggcttccaaagacagtccttcattgataatcgtataaatagtacgctctgttaggaacaaagtatccgaaagttccgaaaccacaactttcatttgtttagcttgatttctatttagataattaataacatattctcttcttttgtctaatagtgttctgcttcttttcatttgtggagttttaatggtaaggattagttttgtttttggtaaggtgctgcttaatgatcggattgggattgactttcttagattgccgactagattttagggagtggtatctaaatctatagtgcctttaacttggtttggatttatggagatgatatcagaggttaaattgtatcctaagtcttccaaagcttcgttgctcaatccgttattaaagaggatgtatttcttttttaaggtattttcgatcaatgtggttttgtaagtgatctcccaaataaaataatcatttttattccagtaggtatgttcgtttgtgcattgtttctcccttattttgaatgttgaattggtatcaatatgagtattactgttgtttttagataataccgctttgtctacacgctgtgcaagattaaatgcatttgcgtaacttgttgatgaaatagtgtctaccggtaatacaatatacaggcaaaaagatacatcggccttatagtttttttcagaggatgtttcccagttgatgttgtcgtatttaaacattacaatcggtgtttcgatagctgttttaaaaatagcatcactataaagttgtactgttggcgcatcagaagtaaactctgattgaattgcgttttttttctcgttataaaaatcttttaaaatcatatgatggattattttttgacaaatatacagcatatgttttaataaatgcaacatattacagtttaaaatgcaatagtttcagtaatatgatttgtggttttttactttatattcgagcaatacgataggaaacaactctcaaatgtctttatattcggtagttatgcgaaaaaaaaaataaaagatgcgattatttgttttatattatttagttttgcaacatatagtggaatatgtgcaggtgttaaaacatattacatataatgaataaagacaagtacaacatggaaatacatactaaaataagacgtattatagacgaattgaagttaaacaataactcattcgcaaagttaataggagtaaccagtactacaatcgatagtatcacgattggaagattgcaatctgatggagaaagaaaaagaacaaaacctggttttgatttactccaaagtattattacccattgcaatgtaaatccggagtatttttttggagcaagcgatgaaatttttgttcagaaaaccaatgatgcggttggcttaaatttaccaaaaattataaccgtaaatgaagagggagaggaaaatattaattttgttggcgttaaagcacgtgcggggtacttggatggttattcggatccggagtatatggaaactctgccttcgttcagtatgccgatgcttaagaacggaacctacagatgttttgaaattaaaggaaattcgatgtcgacaacgatacatgacggggattatctttttggtaagtatgtcgataattttgatgatatattagacggaagaatttatgtgatcatcagtaagaatgacggggtagtggtaaaaagggttttgaaccgaattagggaaagtggaaaattgatccttaaatcggataacagagacgggaattacccgatgtattctatttatgccgaagatatattggaggtttggtacgccagtatgtatgcctctaaacaaatgcccgatcctattaatatttatgaaaaacttcatacccttgaaagtaagttcttcgaattggaagagactttgagaaagaaacagaattagataaaaacagaaaaactgcaacattatgttgcagttttttatttatcatagtatttttagttcaatatgttttgatacttccggtgtgataaaaagaagaaaattagttttctttatactcatcacgcaatatgcctggttcgtcttctaatacttcatcaccacttggttcttccagattgacaccaaacatttccataatctttttttctttttcagcacagagatctaaaccttctaattccttattcgtaaagcttgttcttcgaaatatttggctgggaaatgcgatgtaatctttcttttttccgttttttacaaataataaaataatttttggataagtatcttctatgctgttgcagcctgtgattttgtatggacgaatcgttatattatcatattttattagaaagtggttaaacaaaatatctgaaattttatttagttgttcttgggtaaccactgtttttgaatcatgaaattttgttttgatataattccgaggttctttatcaacatgatattttggcgtaatgacgtatacagaatcatattttgagaagggaaataacatcgttctttcttttaccggaattttgaaaaaagaaacaagtgagtcttcttttgtttttggttctggaggagctggcggtagatttaataaagcgttacgaaagtttaaattttcatgatagaattcgcaattattattacaataactgtttctaagctgtgagagtttgtttttttgagcattactaacggtcataaatgaaatagttagtagaagtgagaggatcgtttttgttgccatagtttgtatgattcttcaatctgctttaaatcatttagaaggtgaagtaagaatttcatactttgtcctgacgcccatttcattaaaatatttttctaaatcattgtacatataatcgctcagatctaagttttctatttttccgaatgtttcttttgttttacattcaaagcttagctctaaatattcaaatactttcccagtctcatcaaaaaataagatagcatttctgggcaaataacaacctctaataatctgtgaacaattagtatttaatctcgaacaactgttatacaatatgtccgataatttttctacttgcggaagatttaaggttttaatttgagttacattttccagagaaagtgaatctaaattatttcttggcagctcaaggccaatattgtaatccagagttgttacagttcttccagtttctttattataagttgcttttgagattcttgtcataccatcagaacttaaattgtacgatatgatttttatttgcgaagttttattaaaaggataagaatttattcgttttgaaagattaaagtttgcagaagttttattttgggacctgttcttttcagttccggatgtttttgataccttaggttgaccatttacgataattgcagtgaacaaactcagatacaaaatagtttttagcatttttataaaatttgtagattcaatctttaatcagttgtattgttatttttcgatctttaccaggtttaacacgaatgctatctttattaaaaattaaacctatatcgccacttaatgcttttgtaatattatccttgttccaaatgcttttttctttatctaaaatatttggagaaaaataacttgttctaataagtaaagaaaaggtattctcttttctaattggggttttccatacttcataaaaaaaataatttctatcttcctttttaattgaatatattacaaactctcttagttctttattttcaattaatagttataactcaatagcaatttttttttaaattttgctactttcgctatatggaaaatttcaagaatgtaaatcctgtaaaggtagataaaaccacaattattaatttagaaaaaggaaaacttccgccgcaagtgcttgaattggaggaggctgttcttggtgcgatgatgattgataaaaagggggttgatgatgtaattgatattttacaggctgatgctttttataaagagggacataaatttatttttgaagcgatcgttcagctttttaccgaaacacagccaatcgatttgctgacggtttcggcacaattaaagaagaatggaaaattagagttagccggaggagatttttatttaattcagcttactcaaaaaattgcttcttctgcgcatatcgaattccactctcgtattatccttcaaaaattcattcaaagaagtttgattcgaatttcgtccgaaattatcgaagcctcttatgatgaaacagcagacgtgtttgatttgctggatcaggccgaatctaaactttatgaagtaacacaaggaaatatcaaacgtagttctgaaacggctcagagtttggtacttcaggctaaaaagaaaattgaagagattgcgaaaaaggaaggattgagtggtgtggaaaccggttttcataatttggacaaattgacttcaggatggcagcctagtgatttaattattatcgcggcgagacctgcgatgggaaaaacagcctttgtactttcaatggcgagaaatatagccattcagtacgggcatggggtggctttgttctctctggagatggcatccgttcagttgattacaaggttaatttcgtcagaaactggattgtcatcagaaaaacttcgtaccggtaaattagaaccccacgaatgggaaatgttgagtaccaaagtaaaagatctggaaaaagcacctttgtttattgatgatacaccttcgctttctatttttgacttgagagcaaaatgccgtcgtttggcttcacagcacggaattaaaattattattattgattatttgcagctgatgactgccggaggaaataataaaggaggtggaaatcgtgaacaggagatttcgactatttcccgaaacttaaaagccctggcaaaagagctaaacgttccggtaattgcactttcgcagttatcgcgtgccgttgaaacgcgtggatccagtaaacgtccgttgctttcggatcttcgtgaatctggagctatcgagcaggatgccgatatcgtttcgtttttataccgaccggaatactacaaaattgaagagtgggatgacgatgaagcatcaccaactgcaggtcaggcagagattatgatcgccaaacaccgtaacggggggatcgaaaacattcgattgaaattcttaggacatcttggaaagtttgataatcttgatgatttttcaggtagttatgacgatttgccatcaaaaatgaatcatgacgataattcttttataactaaaagcctgccttcggccaatgaagctttcggcagtaatttaaatgacgacgatgacgacaacgatgttccgttttaataaaacaatttagcctcattttgaggctttttttatgcttttatattaatacttttcctagaaaattctgtagtttagctaaacaattgcgtaaagcgattaatgaattaaactttaacccaaaaacaaatttaaattatgtcagaagaaaaaaaattaggatcagttgaagtcagtttggctgttggtcaggaatgggctcggaaatttcgaaagtccaaagaaggtaaagagaaagtagatgcttatctgattccgttagagagtatcaagttggtattagaccaggacattgacgccgtgcgtgcttatgtagggattaataatgccggagagcaaaacttaatgcttgtgggtacaaaactagatccaaaaacaggtgtttatgtagatgttttcaaaaaacagctagccgcagcgggagcaagaactgccggagatggtgaagatgtactttacgatgcttctcgtccttgtcctccgtacaccgacccgaatagtccaatgaatcaatagttgatggataattttctaatatattcaggttatttggtactcttacttaacctgattttatatacatatagctttttcctacgggaaaaagctaatgttttttttacagtttatgtcgtgtttttatgtgttattcaattcacgatggagctgttataccgttttcagattgaaaatttattttttgtaaacatctattttattggtcaaatggttttattgggactgttttacaaatcaattttaggacaaaaaagacaaaaagcatttgtagactggagtctgactttaatgttgttcgttttggccgtccagtgtttgattaatacagaacaattttttaaatttaatttgtttgccattacggcgacttccttgctaagtgttgtatatgctttattgcatttttataatatgctgaccgatgacaggaagtattattattttacagtgggattgtcttcttatttactggtaagtacggtcctttttttagtgggtaatcttaccctcggattaagcgatgatttaaaatattttacatggagactaaatgcttttttcgtactgttgtattatctatttatcttatacgaatggaaagtaagttttaatccaaaaaataaaattaataatcagatatgatatgagtggaagcccggtttacgaaaaagagatagttgccatcatcttgtacacatcatgtttttttatggttgtggcatttttcttagtggccttcttttatttttcgagaaagaaaattattcagaaggaagtagagaaaagagatttggaaattcagtatcgaaaggaacaattgcatgcagttattgttactcaggaagaagagcgaaaaagaatcgctcaggatttgcatgatgacatcagttctaagctcaatatagtttcattaaattcacatttactatcctccccaaatttaacggaagccgagacaaatgaaattacggatacaattattagtctaacggctaaagcattagagaattccagaaaaattgcccataatttattacccccggtttttgaaaagtttggtctgaatgccggagtccgggaactttgtgacgaatttgaaagttctaaggcggtaaaagtgcattatcataatggaattgattttgattcgaatcataatgaccgacatttgcatatttttcgaattctgcaggaattaatgaacaattctttacgccatggtaaagctaccgaaatttggattgattttaaagtagaaaatgagattcagacttgttattataaagataatggaattggttttgacagcgaaaataccgaaaatcagaagggattgggtatgaaaaatatagatagccgtatttcgtttttgaaaggaataatcgaaattcattcggaaattagtaaaggtattagcgtagtttttactttttaggttaaaaaagggcaataaaataggtttttacctaatatattgtggttgtagtacttttttctgcttcatattttgtaatttcggtgtaccaaaagaccaaaaacaaaaaatcaaatgagtgccgctattaaaattgctttagtagatgacgaagttttgttccgtaaagggatttcttttttattgcaaagagaagataatatcgatattatttttgaagcatcaaacggagaagaacttctgttaaatttagacaacagcgtgatcaagcctgatattattatcatggatttgaaaatgcccattttaaatggtgtcgaggctacaaaaattattcggaaatcatttcccgaaattaaaattattgcgttaaccagctatgatacaaaatcatttattgccaatatgattcaggtgggagctgtagcttatctgataaaaaatacgactccaaaagatttaattcataccatcaatcaagtagcaaaaaaaggtttttattacaatgagagtgtactgcaaaccattcaggaaactattatctccagtaaaacttcaaaaggaaatctggaaaccggttttctttcacaacgggaaatagaaatacttcagcttatttgccagcaaaaaacaacttcagaaattgcagatcatctttacttaagtcccagaactgtagaagggcaccgtaacaacttattgcttaaaacagaatccaaaaatatagctggtttagtagtatatgcgattcagaatgaaattgctgttttaacgctgtaaatctaagcttgctaaatattgaatggagagtacgtagtataaaattataattagcacgagtataactattcctattttttgtatcatacttaatcccttaggttcttggttgctatcattaagcttcatgcctttgtctttttcattgattaaatttacgcccgggggagagcaaatgtaagaataatgtgcttttacaaaataggtgtttctacgtgattttagccgtgtatttaattattttcaggtgtttttttaacatttgtctacttataaaagcgaaacaactgttgtgttttttgaaggttcctttatatctttactaaaataattttctaatgaagaagtgcttagtttatattttcatattgctactttcattcacggcaaaagcctcgtttatcctacttccgatggacgaaaccacacagcagaatcatcttaaagcctacggaattacctattggtgtttaagtagagactataaagcaagttggttgttaaattatcgcggaggttcatttttactcccggatgccgatgaaatccgtaaagaatgtaaaattagaggagtaagttttgaaattctttcagatgctgaggaggcttcgatattaaatgatatttcaagtccatcccaaaatatggaatctgttattttagaaaaagcacctaaaattgcggtttatacaccaaaagggaaacaaccctgggacgacgccgtaactttagttttaacttatgccgaaattccttttacaccaatttatgatgaagaggttttaagtgatcagctgcttctttacgattggctgcatttgcaccatgaagactttaccggacaatacggtaaattttactctgcgtataaaaatacaccctggtacattgaacaaaaaaaagacgctgaggctctggctgcaaaattagggtatcctaaagtatctcaggaaaaaggagcagttgcaaaaaagatcagagattttgtaatcggtggtggatttatgtttgccatgtgttctgcaacggatagttttgatattgcactttcggcagatggagttgatatctgcgaagccatgtttgacggagatgccagtgagtccaattatcagtcaaaattgaattatggaaattcgtttgcctttaaaaattttactttggaacgaaaaccggaagtttatgaattctcagatattgacatgacctcaaaacgcagaattcctatggagaaagattatttttctttaatggagttttccgcaaaatgggatccaattcctagtatgttgtgccagaatcatacacaattagtaaaaggatttatgggccagacgacctcatttgataccgatttgataaaatcaaatgtcctgataatggggacttgcgaattgaatggagaatcaagatacattcatggcgagaaaggaaaagggatgtttactttttttggaggacatgatcctgaagattttcagcatcaggttggagatccgcctaccgttttagatttacacccaaactctccggggtaccgtctcattttaaataatgttttgtttcctgcagcaagaaagaaaaagctgaaaacataatctagttcagtgaaaattcaatccagattggaatatgatcggatatttttcgggcttcctgaagtgaattaaagtttttatagaacgaaacaataccggaatttatatagtttactgactttttgtgataaaaaatattatcaaattctgatgccaggcaaacagtctctttgcattgttgctttaaagtagtcttttgattctgtaaagtagaatggtatcccattttttttaatggagtaaatacagagtgagattgcgggcagttaaaatcaccaacaaagaccaaatttaagttggaatattgttcaggcagaaatttaaaatatttgatctccgtctcaggttgcttctttttagtgatagcatgaaaattgactaatgtaatgctctttttattgatttcaaaagtgcccagataaggctcacgatcaatttctgaatggtattttttttccagccaggcgttacctttcagctttaccttgcttgttttccagagataagcgtatcgttctgttttatagctgtttccgcttgttgggttgcttatggtatagtcccattttgagcccttattgtttaaaattgcagcaagttttgcaacagcctgtgaaccgccatatccggcaacaacttcctgaattgcgataatatcataagcaagaacagtatttgcaatgaaattcagttctgattcggattttgattttcctaagttctcaatattccaggatagaattttagtttgtgagtacgtgagaacagaaaaaaggaagaaagtaagacttaataagtatttcatgctgtatttaaaaattcaaatataggcatttcaaaattcgattatcgtttagtcgaattctgtttctagtttcaatgagaatctgtcttaaaaaagattctcattgaaatttaagcatcaataaatttaagattaatgctttttatacctgttttttagagcagtaccaattataatgatttgcaaaacaagcagagccggaataaaaataattttccaatctacttccagccatcctgttttttcagaaacgaaagcaaaacttaaggatagaaaaagacaaagtaacattgttttcattatgatcttgtttttagttgtattaatcttcgaaacaaaaacctgtagaaaatttcttttagagctatttttgtatttgattttcattagttgactaatagattacagacaaaagtagatttatttaaaaacatttccttacgggaaaccgtaaaaccaattaaaaattaaatcagaccaaaatctttggcaatagcaattagatgtacattgttatttgccttaaagtaaatctttagtttattaatgcgtttttcgatactgctggtcccgtttggagtgatcgaagttgctttaaattcatttgatatgttatctaaaatatagccttgcgacagaagttttaagattgaaatgtcgtacgattcaatttcaaacaatgatttttcgttgaaattaaaagacaaatcagaagaaagtattttttcttcatttctaaaagttccttcaatcgctttttttaattcgacgatactattacgccctttagaaacataggcactaatgcctaaatcataaaaaagagattttatacgataagatttgtcttctatagaaaatactatcttttttattttaggctgaacttcattaaccgcttcgattaactcttcgccaccatttagaatagttttacgatgatcctttttaaaagataaatcagtgattaataaatcgtatggttcattatccataatagctttttttactttatttaatcccatctaaattcggtaccaatcattttgtataccgatttccattgtgctgaatttttatttaaaagattagctttgtttctagataaatatctagcaatttcataaacattatgaaaaccattatatgaattttcagattctgtaaatgactctattgcagcgttaacatctttgttgattaaaaatttaaaacccgctaattcatatttctcagcatttataaaatctttatttgaactcattcgggcttcaatcttaattcgttcattatttaaagaatctatttttttttcattatttacagagtctcttctaaattcttttaccaacttatcaataacaatcgctttgctgtaatctttatttatagtatctagataattcctccatgactttttgagtctatcatttggtgccactgttgcaaaatatcgaactaattgccgtctctcctccagtttatctaaatctctgacatctactgaatatttttcaaaatatttcatttcttcaatagcttctctcctttcctgataaaaatttgctactataatagctactgttggcagagaaagggtcactaatgcccatttgagatactcgataaacttatcaattttatcattttctaaagttgatttgttaatcaatttatatactataaaaacaaatgaaatacccactagtacaacaaatagatatagtaaaagcgaaaccagaccaatgtttgacatattttaaataaattaaatgttaattcatacacttcgtataaacattttgctatcgttagtaaacctttatttttttggttctagaagacttgaatgtatccatccctctatttttatgctatgtttccaatccttgatatctttaatatcattcactaagtaaactttagaccattgtccaaaagtttcaattaatccaacttcatagccgttttttaacgttcggattgagcttgacgttttgtcgggttttgttctaaattcggcaactccatcagagactgagttcaccagaaagatctttccgatattgtctgtttttccaaaaacatttgttttaaactcatcccaagggaaagcaggtcccggatccggttttcttgccggtgagatatcgtcgtgtccaactacaaaggataattggtaggtatcaatcaggagtttgcttaattttgaaactgctgctatctgagcatctgtatatttaaaccaatactgattttctttactgtcccaaaatttatgtttgtgtttcaattttacaattctgtctttttctgacgcaggatatgttttataacttggcgttccgtcttttttcaccccttctcttctcctaaaactcccatctgttaacttctcacagaatccgacatttacgatttcaataccaatagcatactcattcattcccgttctaccgtcccaactactgtagccggcatggttgcatctggtgttaaatggagcaagctgcgtaatcgttccatcaagatcaattacaatatgagcgcaaatccggtcagtatttccttgtgctgcggtttgtttaaaataggttattgcccccgatgctttatcgcctgccgtgtaatgtatgattaaatattttggcgaaatttgatattgaaaatttggggtgggatcttttactattttttctgcttggctttcctgaacaagccagtttttgtcaattttcataaggatttgttttttagagtttgaaataggatagtttctaaacaataccttcaatttgcatttatggatgatgaagccctaaatacttacctctttacgcataaaatcaataggattaagtcattgtttaggattaaaaatgagtagtagcgtccgttacttatcattttataagcaacataatttaaaacattaaaacttatcaaatatactgacaatcagtattttacaagcgagtatttatacgtgatttaaggaacggatttgccattgaattaattcgtgttctgatttttgttttccggtaattcattcgtaattcagttctttgcggttgggcttttgccctttcagggcgtaaacaatacgaataactattgatagtgcgttccactatgctattgcttttaggctttcagcctgcctggtcttagagttttagttgtaattcgtattacttcgaagtaagtacgcattagtattaaattgcgatttactcggctaattgctctgaaagagctttagcattaacatagtgtaacgcactataatctaaattcatgaccaatatcgccctgaaagggcaaaagccaatgcaaaccctataaattctagtataaaaatactccctcttctctaaaaataacatgcaaaaaagggttgtctttatcagacaacgcgtatatatactggttttcatattatatcttttgtttagttttaccgctcaactttaaaaaaaacatcaataaaaaacatcaataaaaatattacctatgaaaataattgcgcttgaaggactcccaaatactagaaaaacgacaacgattggactattctatcaactgttattaaatgttggcacatctacaaataaaaagcgtttaggaggtgatccaaaagatttttcggatattgtgataaattacaagaatttaaaaattgcactattttctatgggagataactccacagcaatttcgcaggctattgtacattacaacaatcaaaagtgtgatctttttatctgctctttaagtgccgggactcctaaaataagggcaaataaccgaatcaatcgatttaacaatacgagaattccaaaatcaatcacttctcaaatcctaacagaaagtcagaccaataacaatgatgccaatagaatctttgctctaatttaatagtagttccactccatttctacaaagtatgaagactttgtaaatattaaagtataattttgtctaataacgggacgctctcggcagcaagagataatcaattttctacgattttcatttcgttaaaaattatttgtttcagaaaagcctataacagccaaacggataaagacattgcctacaacaaaaccaaactatgaactattacgcgccatttataactttactaattgcactattagctttccattttttattcatcaaatgttttcctcaaggaaagcgattttggaaaaaagttgattacgcctgggtttctttaggagtaattggaatatttggtgccactttttcattaaataaggaatactttactgcacttactccctggcataaaaaatcactagaattggtatatgctgaatatatggaaaggcttgaaaatgaacgaaattattttttagacaaaaatggttttgactatgcgagatttactgataaggaacaagcaaaaagatatattcaggtgggaggaatttatgacagtcttttaaaaatgtctcagaattatcgagataaaatacttgttgaagaagagtttgcttatgttgattctctttccagaaagcacaataatgcttttgcaaatatcaatgatgatgagcatttaaaaagaaatcatgagttatcgactatgatggtagatcgaatagtggaagaatctaatgaaatatcggtggctaaagagcaatctagaagaggaacctttagttggatgttattgtttatctctccgtatctttttgcattggcaatagcgatcagaattacaaaagttactgctgagttaaaagaaattaaataataattactattaccctactatacgaagtcgagaggcttctaaaaagatgattttagattgaagattaacgattgcagatttctgacctggtattggtaaataccgggattgcctattctatacatctgaaatcgaaaatcgttaatcaaaaatcagcaatcctttttaattactttccttaacttactgctataattattccgtagttccaaatagaaaaaacggtttaatccaccacaatttcatctacaaacaaccacgaacttgaaccagttgggctcttttttaaattcgtagcgaatacttttacaaacctggcctcttgttttttaaaattgattttgaaatctttcagctctgaattcacatttacagcaaacgggcgtagtatctttccagcttctttgtaattactgccgtccttagagactaaaacggttagttgtattggaaaataaattccggcaccctggctctctaaagttccaacagttactttttcgatgttttgttctttttcaagatcgattacaatttccatgtccttaaccaaccatgcctgccattgaccgtcatgaaagtttttagaccctctgatggtattgaccattccgagaggtccatctcctttgtaactttcattatatggtatcgcataattgaccttatgccctaccgctttatgaaatacaatcgtatcggaaaatattcttccaaccggtttactattttgaaacaaagacgcttttagaattgtagtttggttaacggggataggcttttcatattttatagccttatcgttaatatttttatttcctaaaacataacgaatatcggaatttggaaattcatttttaagcgtaacattaatcacctttttgtctaaatcagccatagcagaagctgtaaccagataagcgcttttggcataattaatccctaaataatcgtagcgttgcaacaaagaaggcaatctgtaggtaaaattactccaatttcggttttcctttgcactccacaacgcttcagacaaagcggccaatctcggaaagatcatatactcggaagcttttggattggtgatgtattctgcccataaattagcttgaccgcctaaaacatgacgggcttcttgtggagtcatggtatcgacaatggggtcaaactcataaactttgcttaacggattaaaagcatcaaaagccagaggctcttcgttttgaggtccctgataaaaattaaaataacaaggtgattcgggcgacatgatgacgtcatggccttgttttgcggcttcagtccctcctaccgttcctctccagctcattacagtagcctcgggagctaaaccgccttcgagtatctcgtcccagccaattatctttttgcctttagaattgatgtatcgctccattctttttacaaaatagctttgcagttcgtgagcgtctttcaagccattgtccttcattctcttttggcaattcggacatttgtcccaattggttttagtggcttcatcaccgccaatgtggatgtattttgatggaaaaatggcaataacctcctgtatgacgttttgcaaaaattcaaaagtagtttctttcccggcacaataaatatccgtaataggccataatccacctgatggaactccgattctctggttgaaacaagccagttcaggataagctgcaatggcagaactcacgtgtgccggcatttcgatctcgggaatgatttctatattttttgcagcggcatattttacaatttcctttagctcttcctgggtcagaaagccgccatacgttcctttttcctccggattggttagctgtcttgcattccagggcgcattttcctgatcgactctccaggcacccatttcggtcagttttgggtattttttaatctcaattctccacccctgatcgtcaaccaaatgcaaatgcaaaacgttcattttaagcattgccaatcggtcgatagtctcaaatatatagtttttatcaaaaaaatgacgcgataagtccagcatcaatcctcgccattgaaaacggggttcatcggtaatcgtaagatttggaatttcccatttcacccctttaatgctgcttttactttcaatctcttcgggaagtaattgtcggatgctttctaaaccgtaaataaaacccgcatttccttttgccttaatgctaacgttttctttatttacctccaacaaataagcttcattctttaaagttgcatcctctataaactgaacgtaattacttttgggagtcttatttgaaatttcagggcgaaatcctgctgcacttccgaatttgtttattaaaaccgtagcgatttctttttgagcgtcatcctttaccacaaatttagtcgttgcagaaaactgaaaattaccttgtttaagaaccaattgttttggtttcggaatgatttgaatccctttttctctatttactttttgactgtaagcattgcttaaaagggtcaaaaaaaacgcaataacaactggttttagtactctcattttttatttattttaaagaggataacgttttaaattgataaagataacctttgtctcttagtaaatcaaactgaaaaatcacgttgtaaaacaagctatctgcgatttaagagcgtggtttgggtaaatttctgtcgtacataatgatcgttcctgcaacagccacatttaaactctttacggatttaaattttactaaatgatggcatttctccattacttttttggataagccatgatcttcggctcccaataaataaacacagcgtcttggatgttcgtaggtctctaagtcggaggcattttcgtttagttcgacccccactaatcgtgctcctttaggtaagttgtcaagaaaagcttcaaaggtatcgtaatggaaatacggaattgcttttaccgcatcgtgggtatcacaggcttgtttggcatatcgattaccgatagtaaatataaatgtagctcccagattttgagccgatcgccacagtacacccaaattctcaggcgttttaccattttgtatccctatgccaaaatattcgtttgtaaaattatcattcataagggcaaaaatacaaactatgtgaaataaaaaaaaagttcttttttatacctataatctatgtttctatgcgttaattgcttttttttgttaattgtacccaacgacttaattttaaagaacaaatatttatgaataccctgagacttttatttcttttttgcttcctgacgatatcaaagaaatgttatgcccaagatttattgttaaaagatctggacaatgatactataaaagatgagatactctttgatagaaaaaatactcaaataatctgtaaactatcctcacagaattcattacctattaaaagcaaaaaattagatgatttaaatgatacatcaggaattgaattgacaaaaaatggttttcaattttataatcattcaatgcgatccggatactattgtcaattcagatataacaccgcacaaaataaaattgagctaattggaatgagtagatatagtgatggtaatgcagcgcaagatggcagtggggaatccagtgtaaatttattgacacatcaatatattggcgaatggattcgcgttgaccttaaattaaaaaaacgtataaaaattccaacaattaagaaatcctatacaacaaataaagtttatctgcagcagttcagtgttaagcagcctgatgattttgtcgaattttgcgataatataagaaataacatggtgtattgaatataaattagtttttcagtctcagtctcagtctcagttttcagtctcagttaataataatcgatagattatcaataagatttccacctcctctgctagttataatttgcattttataattttatttacacttaatttcaataccttgttttttagcccacgcctttgttagttcccacgcttctttaggtgttacatcagcttttatcaatgctcctttagtcccatcagcatcaatcaaatgtaaatctcctttgtaagcctgaatatctggattattataatgtttttctaaagttcctaaccattgatcatttgataaacctgcattctttatttgatctgatttaactaatggctttgtatctcccccaatgccattatatccatgcattgcactgtgattgtctcctgtaaattgagtatcatcccaatatagacttggcacgcctgtttgactattaaatggttttattcctaaatcagttgctgctttatgaggtacaacgtgatgtccctgattaacagggttacctaaaggcatcaatccaaaaatatctacccaactattacaatcatgaatatacttgtaaagctctctaccccccattagcccaattggatcctgactaatatacattcccgtatcaaaagaataataacgatatctgttatagtaaagccctatttctaaatcctcatactgtcctaactgtctaaacggaataaagcttcgatcacctttcagattacgcaaatctccataaatatcataatcagtttcccaaactacatttcctttttcatcataagcttgtacgggtctgccaatataatcattgattattgagaacttttcttctccaattatttttgcgctaggtacaaaagaaccaccctgatacacccaggtaattaaattctcaatcggttcctgtttatcatatactaaatcatcgtcttcaacaatgagcttaggtctttcacttaaatcgtacttccattcgtgaataagaacgtttccatcccaaacataacgatttattttttggtttgcaatttttgcggtacgtctgcctagcgcatcgtactcaaaatgtactttcttaccatcggggttggtgatgctctcgagcattccgttggccagccagttataggtggtatctccgtcctgccattgctcgtgctcttgctgtagtctggcttcttcggttttgttgccccccagtttgtcgatccagttggtgggttcttcgaattttagtttctcattaatgtttctggaacttttgtgtatcaggttacccagttcatcgtatttgtaatggtacttttcatcctgtaacagtttaccacctttaccatacttacgatcgctgcgatcgggagttttgtaaagattccctaccgcatccggggttttgtacagctgtccttttccattgtaatcagccttggcaagattaccaaaatcatcgtaatcaaaataggtgatgcttgaggtcatttggttcaccgcactgcgcaattgctggttggtatcccagttgtaaaagcgtgatcccgtgcgtttgccattggcaaatacttcctgttccttttgttttccgttgttgttgtaactggttttaatatggagtcctccagtagtgaagcgttctatttctcttcccaattcgtcgcgtttcagggtggtttcccacttctggtgctgttctttgagttcgttgctttgtgcctctatacgctctagctgtcctttcgaattgtaatgagtactgatctctgttcccaatgaactatttataccaatacgctgtcccagtttgttgtaagtggaggtaagggtaatggcattatcatttttgtcgagctgttgttgttgagtttcttttacgacacgccccatttcatcacgctctataaatatacttacattctgatttacggcttctgttaaaagtccgtttttgttgtaactatacgtttcccaggtgccgtcgtgataatcggctctggtgatgcgtcctagtgtatcttgttcgtattcggtaaattttccgttgccatgatcgattcgggtgacttcacctgcaagattccgctggtactttttcaccataccatcaaaagcggtttcttttacaatttgtccggctttatttcgggcgaaataatatacttcgttgtcttcgtttttgatggcttgcaactgttccatcttgtcgtaatcaaaacgcactttcacgccattttgttcacgcgtagcgagacttcccattggggtataactaaacttaatgctatttttattatcttttagcgctatgacttcatcataattgttgtaggtaaactgtatgacattactgtctttttctacaatttgtcttaccctgtccaatgcgtcataactaaaataatcggccatctgcatcggggtgtagatcgcttgtacgcgtccgcgatgatcgtactcccatgattttaacttttcgctattctcacgccactctacaagattgaattgatcatcataaatcagttcgagtttattgttgtttttggcaacgctggccagtagtccgttatcgttataagtgaaatgactagtacttttatcgggagcaataattgttttgagctgatcctctctgtcttctttgtacagataaaccgttttgttcccttcgggatctatagcaatagacgggcgattttcctcatcgtaaatcatgatttcttcggtgccatccgggtaaacggtaccggttttgtttcctctgtcatcgtagttaaagcctagtatacgtccttcgggatcaatctcacgatagagttccataaactcggtataatcgtaaaaggtactgttgcccattggatcttttacctgtgtgaccaattgactaggctcgtaataataagtagttacggccctattggcgtctgttactaaattgtatccttcttccgtatgatattccatccagccttcctgccagcctccgtcaccccaggtgtgtgtacaacggttttcattatcgtattcccaataaaatgtttgtccgttacgatctgttttctctaccatcaaatggttatcgtaagagatcacagtagctttttgaagcgcgtcgataatcgcacttatgttaccttcgggatcgtactcatacgctactaaaagttcgtcctgttccgctccgataagttccattttttgaataaaaccgtctttcgtacttactttgatggctctgccggcagcatcgataattttatttaaattgttagctgtaaattcaaaaacaatacaaagtccgtcggggttgctaattttggtaagttggtatttttttccattaaaaagagtaaactcatataaaagtttactactatgttcgtaggcgctatacccttcctgcgttcttttaatagtagttttttcttcacgtaaataaaattcttcttcgggcagcagtgttggaaaagctacaagtcgcccgtcatccatacgaagtccaagagcatcgtcttcaggatacaattctaccgcccgatcgtagacactatgcacaccatgacccagccatcccacatatggggagtctgaataccaactgcgctcccagtttaaaggaatcggactggtaatactgaaatcactgccttcataaattacggcaccatttataaggttaataggctcaaaaccaaatctacacaagattcttttaagcccttttggactttttccactcgtattaaattttttaataagtcctctggcttttttcatcaaggtactaaaaccaatactagctaataatcctgtaaggactcctccccaatcgggaggatagggtccaccaaccattacgggtttccccgttgggataggcaatgaaaatgaggttggggcaaaaagggttggggcaaacggtagcattttcttgcctattttggttttccctaaagacatcgatagggggatgccgatatcattacaggtcattagcatatgtcctttgggactcatcctcgtaccgtctgaaaaaacggtttgtgaggcgaaaaaattcatactttcatgcccgataatgggcatcattagccaaggtggcgtaaaaagagggatatgttgtaatggaattatgattccgctggtatcggaattacctcttttaaaaccatttacatgcacagtggcacctaaaaacggaacgtaatcaaaagggtccatcactatacctatataaggatgaaacgggttaaacggcggcagggtagtaaaatgaatgtctatacccacgactatggttaaatgattatcggttaataacataattaataggtgttgcttaattgatattcctcttgtatctgtttggctatttgttttggattgtcgttccagttttctccaaaaatgagtaccattcgtttaaaaacagcttctttttctgaatacccaattttagggtcgctctctaaataactgtcagcaataaaagtaaagttgacgattttaagggtttcgtcggttagtgcgtatccgtactcaaaagcatcatttaaaatttcggtatatcgacttccttttttcttggcagccagcagcaatgcataattgtacccgttgatcacctgcatttcctgatttatttccttagcaattgccacttgttttaaaaaataatcaatcgctgtatctgtatttccaataatgctgtgatgcgaacctttgtaaactaatagctgcattaaaattccagcaacatcttctttctctttataaaatggagttgttattttaattcccttatccaatagttgatgaataagctccttctcgtctttaaattggaataaaaaactggcataaattaaataagatgaagcccaaaaactggtttctccggtactcttactaatgtcgataagttcattacccagtttttttactttctcctgttttttgttttttgctgcctcaccaatttcaaacaaacattttcggtatcgcacctgtggatcatttggatttccttgtgcagctatttctttgtaagctttgtttatttcctgatttggaatttctatgatggttccgttttcctttgctgcaaaaactacatcgcgatactgctgtctttcctgataatccaaaaacagaaaacctatattttccggcaataaaacggccagttcattcagactttcggtcaacaaatcggcattgcttactttttttactaataaacttacgatcaaaagatttcctgtttttgcttcaaattctttaaaactaatgagcattttgatgtaaaattccttcagactttcaatactaagctgattaatttcgggaagtatttctttaaaagtggcaaagtctttccaattccaattgggattttttttcaggtcttcttcaaaagttacaatccattgctctatgatcgtgctgtaaaaatcttttttatcatcaaaatcaacaacaaaagcaacaaacgaatcttcggatttaccataggcagaagattctaagtgaatgaaagcatccaataaaggaaaatcatccttaaaacaaaccatactgaatactttagcttttggcttttcttttcgggttttgttccagattttctgaatgttctcgactcttacagcgataggattgtgcgtattatgcatttttaaattctaatttaagttcaccactccacctttaacattggtcattgttttaccgtctatgtcaacaacttttccttctgccaaaatggtattttttccttttatattgatacttggcgcttcattaccgatttgagtgtcacttttcacactcacctcatccgtaccaacagccactatttttttactgtcgacattgacctcatttataccatttatatttaccttttcatcagcaagaatgttaatttctttcgacaaaacgtcaattttgtttggtgcataaatggtcatggtcccgtcaccgttaagttttatcatattaccacttgggtctgttgcggtaaaactattatctccttcatctaaaactaaagaagttcctcctctggttgcaaagcttcttttgttgttatcctgaccaccgcctccaccactttttccatgaaatacgcttcccaaaatgaaaggtctgtttgggtctccataacggaaatgaaccataacatgatcccctacatcgggtataaataccattcctctgttacttgctacttttccgctgcttcctgcatccggagttagaacacgaagccaggccgttttcatagaagtaccttgctgccaaagcatttgcaccctaattcttcctttatttttaggatcggtattgctttctaccagagcttgctgtgtttgtgctattggataagcgacatcgggttccggaagactcaatacttttgaaggtatcgctctgaagttattttcgtattctcctaaatgggtcgcatagtggctaatttcggtaataatataagagcctacttcttgtgttatcatactttcgttttctaaaacactagattttatgttgactatacttccaatttttaatttggtatttttagtagttgccgaaacataattggtatcggcagcagcactttcctgtttcttttttaagaaagattctaaaaccaaatcgtcgcctgtactcactattccgtgtgtaaatgccggtgttgcaaacacctcttttgaagcagcaaaagcttcattgcctaattttggcaaaccgcctaccgtgtcttttgattttgcgctatagcgtttgtcagcgctttcgttataagtaaaagcactaaatttatttggtaccgcctgtacggatatttttagttttgagatatcactattgtaggtcagagagatcggcttgtcgaaacttttaggtttaccgaagattaacttctctccatcataatacaaccattcgttgtattgttttgccaatcgctgaatgaactgaaaatcggtttcaaggtattgattctgatagtccattttactggcatattcagggtttacctcgttttgcagctgctctcctgctccattttttatggcttctttgacgatatcttttaaattcatttcttcccaggaatgcagcttttcaccggactccaacaagatggtctttgaataacctgatactacaatatggttgcctgaatgccccatttcctgatcaaaatcgatattggtcactactcctaaaaagttgtttttatcttcaaggatgatgtgtaccactttacctaaccaggcctgagcattttcaagagtataggccaaaggactttcgacaacggcatggggaacacgaatttcgaatcgatgatgatcgtttatcacctgtaccaattctatactggtaaaatgacttattctcttggaatctattccaaaaattatggtttgtagtatcattattttaatctttttagttagtactaactatttatatctatcggatcagtgtggtgttaattaatttttataaatctcgtatcgattaatgtatttaaggaatgttattattttttaactgtttttataaagatgataaatgaatcgaaagaagtttttttttagcttaaaatcaacttatgaagcttgtttttaatctaaaaaatttatgatttttaaaaattaatagaaaacataaataataaaaaaagcgcttataaaaagcgcttttcaatagattactttgatattatttttgaatcatttcagaaagaatttcaatttctctctccgaagcattttttggaggatttgaatgtaacttcaaaatatcttcttcaaattgctttcttaaactttcattttctaaatctcttaaatttaaaagtgctttagatctcacataagtagattcacttctaagagacatggtgtataattttttaatatcgtcttcttcaaaatcaggagattttaaacttgagtattttagaataaactgagcaaacaacaatgatcctttattattgttaatattcttctttaaagaattttgcaacaacgaaaagctggaaacatttttaatgctctcccctattgcactttcaatggcaatacgttccgcttttgtctccactttgaaatatttattgatatccttcaaagaattgttgatactattttcttcttttttccccttctcttcccaggcatcttttagtccaaccgttttgttaaatactaattttgaaggagttgcatctttatccactgtaaaataacccagacgttgaaactgaaatttatcttcattttgagctgtagctaaacttggttccacaaatccagtaattatttccaacgaatttgggtttacaaaatctaagaaatttttctctttataactgtccggagcttcatctgtaaacaaacgatcgtacatgcgaacttctgcttcaactgcatgttgaatggaaacccaatgtaaggttccggatacttttctctgacttgcttctgtcccgcttccacttaaagaatcagtgtcataacttacatgaatctctgtaatattaccttctgaatcttttataacagcttctcctttaatgatataagcattttttagacgtacttcttttcctaaagtaagacggaaaaatttagcaggcgcttcctctaaaaagtcttccctttcgatatacaattctcttgaaaaaggtacttttctgaaacctgcattttcatcttcctgattattttcggcttccaaccactcctcttttccttcaggataatttgtaattaccaattttaccggatctaaaacggccattacacgtggtgcaattttgttcaaatcttcacggatacagaattctaaaaccgatacactgatcaggttatcacgttttgcaataccaattgtattagcaaaattacgcaaagatgcagcagtataacctcttcttcttagtccggaaatggttgacattctgggatcatcccaaccgttaacatgtttttccttaactagttgctgtaattttcttttactaacaactgtatgcgaaagattacgtctggcaaattctctctgcttcggacgtagtttattatcttcaaaaatttggtctaaaaaccaatcgtataattcacggtgaggtaaaaattccagtgtacaaaaggagtgtgaaatttgctctaaataatcactttgtccatgtgcccaatcgtacattgggtagattttccagttatcccctgttctatgatgatgtttatgcaaaattctgtacatgataggatcacgcatcaacatattggttgatttcatgtctattttggcacgaagaatatgagtaccagcctcaaattcaccatttttcattctttcgaacagctctaaattctcttctactgaacgatttctgtacggactatcagttcctgtcgttgacggagttcctttttgaatcgccatttcttctgaagactgactgtctacataagctttatctttcttaattaacagaactgcccaatcgtataattgttgaaaataatctgaagcataacgttcttctgaccaggtatatcccagccactctacatctttttttatagcatcaacaaattcctgctcttctttttcgggatttgtatcgtcaaaacgtaaattcacaggtgactgataatcaagtcccaaaccaaaatttaatgcaatagaacttgcatgcccaatgtgcaaatacccatttggttctggtggaaaacgaaaatgaagcttggttttagaaagacctgattttaaatcttcttctatgatttgttcaataaaattgagtgatttctcttctgatgccattattttatagtaattttagcaaagataaaaaagtttacagttttcggtttacagttttcggttttctttagaaacttaacatgaaacctgaaacttgaaacataaaacctgaaactaaaattaaaaatgggagttataaaattaaaaaacatccgtactttttcctaccatggatgtttaattgaagaaggaaaaattggatctgattacacagtcgatctaaaaatcaaaactaatttacaaaaatcagcacaaacagatcatttgttagatactgttgattacgttcatttgaacaaaattgtaaccgaagaaatggcaattcgttctcatttattagagcatgtagccaaaagaatcaataatcgtgtactttcggagattgaaatgatagaaaaaactactgtttgggtttctaagataaatcctcctattggtggtgatgttgaaacagttactataaaaatgacggaaactagaaaataaatttttctttaaaaatgctatttttttaaaatagttactttgaaacttttgaaatttaaagattttagttacttttgccatccgttcaagtaatggcgtcgtggccgagcggctaggctgggctctgcaaaagctcctactccggttcgaatccggacgatgcctctaaaacctctaaagaaatttagaggttttttttatgtcaatttttagaaaaaattagataaagatttatgttcgaatccaaacgatgcctctaaaagagatacagaaatgtgtctcttttttttatggtaatttttagaaaaaattaaataaagatttatgttcgaatccgaatgatatcttaaaacctttaaagaaatttagagttttttgaggcattaaattatacacaatcttgtcatttcgaggaaggagaaatcacaccagttaatcgacaaagattgtcgacttagtttgcggagtttctaatgtgatttctcccttcggtcgaaatgacaaagttttcgcaaaataacgttgttaacaatagcaaacagtacaggttttagaaacctattgagtttagttgaataaactgagacttataaacacaaaaaaacctctgatatacagaggtttaattttataatttggagttatcaacaacttacttttcaatcttttcgaaagcgtttttaaccatttctttttctttaggaaaccaaccctgaatcattaaaactacaccaaaaaccatcaagacaatactaataccttttttaatttttaggatattcgtcggtgtcattttagattttaactgtttggctaataatattttaagacaatcaactactaaataagtaatgataaccgaagtaaaaaaagtaaacattcttgaattttgcatttctaattttggtcctacagaaataataaccgctaaccagaaaccaagtactccaatgttaataacgttcagtaaaaagccttttacaaataaactaccgtagtttcttttaataatatcacgatcgatttcttcgtcgtttatttttgcttctttctttagtcttacgaaagaaattataccgtacgccagcataataattccgccaaaaataaaaagagccggtttgtcttttaaactctgaatcagtctgtaacttcccaaataagcaattgcgataaagaaaatatcacctaatacaacaccaagatcaaaaactaatgcagctctaaatcctttagtaatactggtttccaatagtataaaaaataccggacctaccataaaacttaaaaaaagtccccatggcagtccagccaaaatatcatttatcattcaaatacaatttcttattttacttcttcgattttacctccaaaaaccgttttttgattgatttgtttcggttttccataaatgtaaatagagcctcctgcgctcacttttgcatccacaagggttgaagcattcacatctgcttttcctcccgcagaaacgcttactttcgtttgtgaggtctttaatttacttgccagcaaataaccaccggctccaagacctgcatctagattatcggctttaccacttaaagtaattgaaccaccggaaacggagctaacattgagtttatcaacatttaattcaacattaattgttccgccttcttgtgcacttactttaaatactgttgcttttataacatctttactactaacgctggctccttcattaacatctataagctctaaacgtttgtaatatacagtaatatccaaatcatttcctgataataacttaggaaaaggcattcttaattttaataaacctttcttgttaacaacttcgacttctgattctcttgctcctttaattacaatcttattttctgatgactgaactaattttacacttaacttatcaaatactttaacggaatcaaaatcacctaactccttagtaacctgaccaaaagacatctgaaccaataaaattgcagctactataattaactttttcatacttctattcttttaaattaaacttctattctgctcttcttaaaaaatgaaaatccaactgttttttaactaaatcggcatttttaacttttacataaatttcgtctcctaattgtaaaatgctgtttgaagtggctccaaccaatgcatattgtttttcatcgaaagtataataatcatcttttatctctctgattcttaccattccttcgcatttgttggaaacaatctccacatagattccccattctgtaacaccggaaataacaccaaggaattcctcatcctggtgatcctgcatgtatttcacctgcatgtatttgatactatcccgctcagcattagtagctaaactttccatattagaacaatgtaaacattttgtttcgtaggcttcttcatctacagaagctccattgtctaaataatactgcagcaagcggtgtaccataacatccggataacgacgaattggtgatgtaaaatggctgtaataatcaaaagctaaaccataatgaccaatattctctgtcgaatatttggctttactcatacttctgatcgccagagtatcaattaaattctgctcctttttaccatttacttcttccatcaaagcattcaatgatttcgaaatatctcccttgtttctaaaatctattttgtaaccaaacttagcaattacggtttgcatcgcaattaatttgtcttcgttaggttcatcatggattctgtaaacgaatgttttcttttgtttaccaatgtattctgctacttttctgttggccaaaagcataaattcttcgatcagatgattggcatcttttgaaattttgaaatacactccttccggttctccttcttcatccaggttgaattttacttcgactttatcaaaagagatggctccattggccattcttttctttctcaaaatctttgctaactcatctaattttaaagtggcttccgtaatttcatcagaaactgtatacgattctccggtaattgagatatcaacaggaatggtattgtcttttgtttcaattatatactgtgcttcttcgtaggcaaatcgctgatcagaataaatcacagttcttccaaaccattggttaataacctgtgcagttggagaaacttcaaaaattgctgagaaagtatatttctcttcatttggacgtaatgaacaggcaaaattagacaatacttccggaagcattggtactactctatccaccaaataaaccgaagtggcacgttgataggcttcatcatctaagattgttccttcttccagataataggaaacgtcggcaatatgaattccaatttcataatttccgttctctaactttttgaaagataaggcatcatcaaaatctttagcatcttttggatctatcgtaaacgtaagtgtatcacgcatatcacgacgttttgcaatctcagcttcctgaattgaggtatcaattttttgagcataaacctccacttctaccggaaaatctgccggtaaaccgtattcagccaaaatagcatgaatctcagtattgtgttctccgggttttcctaaaactcttaatacagatccaaacggactatcggctctttttggccaatcttcaatggtaactaaaacaacatcaccattttctgcctctcctattttatcttttggaataaaaatatccgtatacatcttagggtttgcagtggatacaaaagcaaagttggcctgaatatctattactccaacaaattctgttttatttctttctacaacactaattacctcaccttcaggtcttttaccttttcttcggttgtacacataaactttaactttgtctttgtctaatgccctgtttaaattattagttggaataaatacatcttcgctaaactcatcacaaataaaataggccgtttttcggctggtcatatcaattgttccttcgtaataatcctgactttcggcttttactaaatatttacccggttctgattcaataattttctttgaagcggctaagatttttaaatcctttataatctgatttctgcttttagtatcgtcaagttcaagttttgctgctatttgtttgtagttgaatcctttattagggctttgcgataaaatttttactattttactggagaaatctttctctttttttatcggctttctaattttcttactcatatatcttttcttaaaagtttaaaattacaaataagatatcagattatatattttaacaaataaattattaaaaatataactttctggaagccgttgcaattcgtctattcaaattagtactaagaacaaattttagtactattcatttgagtatctttacaaaaagacctgatatggaaagctttaaaaccattgctgtattcaattatttacacgaaaccgtggttctgaaacacttattagaacaggaagggattccttatttttttgaaaacgaaatgacactgtctgtcgttcccttgtacagcactgcgctgggtggaatcaaactcaaagttcatccgaacgatttcgaagaagttcagcaaattctggacaatctgaacaatcctctgaaaatcgtttgaatccttctattttttcaatttcaaaaaatatttttctttttcaattttcaaagttgtcaacatatattaaatcatttatcgtgccttttttgcaaaatgtcttttttcatcaaaaagccgttttttatattatacttattaaaaagtaatatttttttcaatatctgtttttttttcctattatttatgaattaaataattttaagaatagactgatatttaatacatttataaaaaaaaattctaaaaacgtatgagttattataaaattgaaaatttagaacagtattttaaacattacaataagtcgataagagagcctagaaagttttggggaaaaatagctgaggaaaattttacctggtaccagcaatgggaaaaagtagttgattttaatatggctgatgcggaagtaaaatggtttacagaagcaaaagttaacatcactaaaaattgcatcgacagacatttaagcaaaagaggagaaaaaacggctatcatttttgaaccgaatgatccctcagaaagcgctttacatataacgtataatgaattgtacgaaagagtttcaaaaatggcgaatgttttgcgcgagcaaggcgtacgtaaaggagacagagtttgtatttatttacctatgattcctgaattggcagtagctgtattggcctgtgccagaataggagcgattcattctgttgtttttgcaggattttcagcttctgctgtgtctgccagaataattgattgcgaatgtaaaatggttattacttctgatggaggatacagaggtaataaaaacattgaccttaaaggaattgttgatgaggcattagaaacttgcccgtctgttactaaagttttagttgtaaaaagaactaataacgaagttaaaatgaaagacggccgtgacgaatggttacagcctctattagataaagccttagataatagtgttgcggaaataatggatgctgaagatccgttattcattctgtacacctctggttctacaggcaaaccaaaaggaatggtacataccacagcaggatatatggtgtatactgcttatacctttaaaaatgttttcaatcacgaagaaaatgatattttctggtgtactgctgatataggttggattacaggtcactcttatattttatacggacctttattaaatggaggaacaaccgtaatttttgaaggagttccatcttatcctgactttagccgtttttgggatattattgaaaaacataaaatcacacaattttataccgcaccaactgcaattcgttcacttgcaaaagaaagtttagattatatccaaaaataccctctaaaatcacttaaagtaattggatcagttggagagcccatcaacgaagaagcctggcactggttcaacgatcacgttggagataaaagatgtccggttgtggatacctggtggcagactgaaaccggtggaattatgatttcgccaattgcctttgtaaccccaactaaaccaacctacgcgactttgccattaccgggaattcaacctgttttgatggatgagaaacgcaatgaaatcgaaggaaatcaggttgttggaagtttatgtattaaatttccatggccgggaatcgccagaacaatctggggggatcaccaacgctacaaagacacttatttctctgctttcccgggaaaatattttacaggtgacggggcattgagagacgaagtagggtattacagaattaccggtagagtagatgatgttgtaattgtatccggtcataacttaggaacagctcctattgaagatgccattaacgaacatcctgcagtagccgaatctgctatcgttggattccctcatgacattaaaggaaatgccttatatggttttgtaatcttaaaagaaacaggagaagttagagaccgatctaatcttagccgtgagatcaatcaatatatttctgaccatatcggaccaattgcaaaactcgacaaaattcagtttgtttcaggcttgcctaaaacacgttcaggaaaaattatgcgtagaattttacgtaaaatagcagaaggtgatttttctaattttggagacacttcaactttgctaaaccctgaaattgttgacgaaattacaaaagcgagggtctagtatcttcataaaataaaaaaagctgtccattgggcagctttttttatatcggttattttttttacttcattaatcctttaagaagcgcataaatagccattgcgtgtccgtgacctaaatcaaaatctgcttttagccaggttacaatttcggttgcttttacttcaggttttaattctccactgacagaaaatcctttttcatctgaaagttttttaaaatcatcaggaccttttcctgtctttgttttaatattggttaaataagcttgaaatgacataattttgtagttttaaaggttatactttatttttcgacaatcgtttttatgttcgttagactttcttctacatcagctccaattattttatccatatcaaaaaaaagaagcataaaattcttaggccagttcattccgctattataaatccagataagctttgtttgatttccggctaacgtttctgtttccatatgcccgtttgccgtaaatacataaggcgctagaaaacgaagttcaaaatcgattctgttattttctactttttttatttcccattctcctttaccagtcttatggtgtttgctttcaaaagtcagaagagaacccgcagtcccgtcagtacctgttatctctatttttgtggcaggatccagcaatagccatttactgtacaatttttgatttcgattcagttttataaaatcaaaaacttccgctttgggtttataaatagttatttctctcttaatagtatacttatttttagtaaacatcgctactactaaagctattgaaactatagctaccaataccgttattatttttacgaatatcattttcatttttgttaaattggttaattaaaaagctctttatatttatttctaattttgatttgcagtgaagttaaacatcccggagattcaccgatggcctgaaatataatctgactgttcaaacattttctacataatacctttactttaaggtaattaccgctgaaaaccagataagaatttatagttgtcattttgttttactttttctgttaatttttaatcaaactaacaagacaaagatgcgattacttacaaaagacaatactgtacgtaaatgacaacaatagggggatttacgtcatttctttctgccgccacgaaaaacaaacaaaatcaaaggcttgcaaaactaaagaactttgattgcccttagcctgacagcttttcacctaacaaaaaaactctaaaaaaaacaaatccgacaaccccaaaaccttgggattatcggatttacaatatttaattagctatgctttattttgaatactccaaattatcttgtggtatatcctccattagcaaaaatagtttgcccggttacccaccagccatcggtcactaaaaactcaactaaaggagcaatgtctttgatgtccgtaagtcctcctaaatccgaagcctgtttgtgataagccactgcatcagcactttcctgaccatagaagaatggtgtatccataggtcccggagcgacagctgtaacagaaatacctcgcgaaccaaattcctttgaagccgctctcgtaaagtgctctaccggagcttttgcccctgcataagtagaataatatccggtaaatgctgccagtaaggaagtaacaatcgtattaattttaccattgtcattcaattttttacccgcttcctgtataaaaaaataggctacttttgagttgatatcactcatactgtcgtattcttcttcggtagtctctgcaaaaggtttctttagcactttcccaacagtattaatagcgatatcaacacctccgaacttagcaattgcagcatcaaacaacttggtaatatttttcacctcagtaagatcggcctgaaacaaaaatgcttctcctccggcattttcaatatctgccaaagtcttttccgcatctgcctttgtgttttcgctgttgtaatgaatgacaacttttgcacctttagctgcaaaattacgacttaacaaacctcctaagttttttgcaccacctgcaattaaaaccactttccctttcaaattgtttcttgccattgtatctaattttaaattaataacgtaaagatgacaaaacagctcgtttatttcatggtgaacttttcggaaattttatttttgattttccgctctgaactgtcccggtgtctgtccaacaaattttttgaagaatttagaaaaatttgatgggtcgtaggtaagtgttctggcaacttcagaaacagatttatcggtgcgggcaagcattctttttgcttcttcaataatttttaaatcgtaaaagtaacaagggtggtttcccgtttctttttgaacggtatcagtcaaatgcttatgagaaacaaacaacgcacttgctatttggttgatttccataaagtcggcgccatttcccaaaaggacctccgcaatatgtgtatccaaaaaaaggaaatacttttcagtgatttccttacttctttttactattttttgattcatttcactcattatccaacacttataaaacaaaatttaaattcgttttacttcaacaatcatttatggtgaatccaactgcctatttaattcctaatctcgatttcagtttcaggaataataggccaattttatacgcgtcttctgcagacgaatttctatcgcttttcggaattttgaatatttcacttaaatcgtccaaagaaaactgtttgtcattaatatccatcaattttcggtacatcatatcgatatccagcgcttcattttttaatcttccacaatccagacgttctaatgctgcattcagcatttcgatatcaaaattaatatgatgtccaaccagaactgagtttcctataaaattgattaaagcttctatcgcatcaggttccggcatcttcatcattttgctttcgatgataaactcattagaaagtccgttatcctgcaaaaatttgtactgcagcaaaacagcttcaaaattgtctttaatcacaatgctgtcatccgtaaccgaaaatgcgcctaaagataaaataacatctttattcggatttaaacctgaagtttctgtagataacaccacaaatctgtttggtttaacttcaaatttcgttaagtattccttccaaaaatcaggatactctttattgatatttttaatccagtctagcatacttatgagaattgtgtaagttgaaatttactcttaattaattcctcaaggtctttcattggggttaaggcattttttaacttttctttgtctgttttggacatttccctcaaattgatatattgtccggaatcgtcatttttcaaaccttcaacagttctaaatttagacaaagttagaaaagcttcagcacagcttaaataaatctctgcatttttagaatctgtaatcgctaattgtttaaatctcaaataagtatttttaattccctttatattagcattcaaaatcagcaaacgagctgaatcaattaaaggcattaatgcacgggttttaatatcaaattttgttttatgtggtccttcttcttcaataataaactttttgaaaaagcttaatggagaattgcgttttaaagcatcattccctaagaaatcaaaaaacaaagtattgtttacggcattcttaaagattacgttttcgatcacttcttcaatttttggttctccaaaaacaatctcataatcaaagaaaatactgctcaaatcattactgttttcacctggagtattcatccagctattatactgttttgtccagtctgtcaacgacttacaccaaagcatattactccccatatgtccgtttggacaaagttcgtaacccactttttctaagatggaagttgctcttttagccagtcttaaaaagtaatcttttacctctctgtacttgtccggtgctacgtcttcaaaaatcagaatactgtcctgatctgtaagcaaaagctgctctttacgtccctgactaccaatacttaaccacgcaaaacgagcaggaggggagcctaaatctaaaatagacagctcgacagcacgtttaataatagccagattaatttcgcttgcaatattactgacatgcgaaattggaatatttttttggatcgaattctgaattaaatcagacaaacgatcgcggatttgttttagatcttttggtaattgagaacgttttacttccttaatcaaaacaccaggattactggcctgagccacaattagatcgtgctcggaaataattccttttacagcagatttacttgtaccatctttggtaacacataaatgagtaacattatgtttcaacattaataattgtgcttcagccaaagaaacattttcaataaccgtaaccaccggcgaagacataatcttatcaatggtttcagtaataggatagcggccagtcgcaattttagaagataaatcagcgttggttacaataccaattggattgtttttttcacagatcacaatattgtctaccaatgattcggtcatcaaaatagcaacatctttgataatgtgattggattcagttgttaaaggtgaattattataagccaaagactgaatgtactgcatttcagattgctgatctacataaaaagcagtatcagaaatcaatttcccgttggaatgtacattgtcctttgcatgtcttgaatttacagcaaagctttccaacagaaaattcaacacatccgaattattcgctacgaatggtctgaaaactgcaattggaatagcatagataatactttcttcacgagctttagccgtcatcatatagttatttttggcaaaaaacggacgcaagccaaaaatatctccttcatgacatttgtttataatcgtttcctcggcatcagcaattgtggtcagatttacaatacctgaagcaacaacataaaagctgtcatgaagcaggtcattgttttgaaataatactgcatgtttttctaaattgatcacacgaatgttagttgcaatatctgataattcctgaaaagttaaattatcaaatggcgggtattcttttaaaaaatctgcaatatgctcagcaattgtattcatacggttgatattttttttaaagtatcgaatgtaaaaataagaaaattatgtcttagaatgaaagcatcccatacagaatataattattttaaagaaaccttaaatataaccattttaaagcttctaaaacagctcattataattttgaaactcaatttaaattagttattgatatggattcgtgaaagtacagccacagagtagcactgagaatcgattcttttgcattagtaaatcttagcttgaaatatactgcctgaagaattatgtattttggataacaatgacctttagtattcatcttttgatcggtttaaaattctaaagataaaagttattcccagatgcgacagaaccgaatcgcggcaaggaaatgttttaaaaaatagaaacccagaaaaataaatctgtagcaagcttaggttcgaaactattacagtccaacaattctgtcgagagggtcggcagaatttattttccatattcaaatgttttcaaaattagattatattcattaaattagcactatggataaagaagcagaattaggactcgattttataattgacaaattaacaaactcaatagaaaacgtgattactagagatagttttcagactgaaatttctgttctccaaaattctgatttaaagtctttaacaaagaaaaatggctggctttttaattggaatgaagaatttaaaaatccaattagagatgtttataaacttacaatttttggaaattcaaaaataattcaaggtcttataagcttagaagttaagtcagatcatgtctatatgcatcttgttgaaagtgctccattcaataaaggacaaacaaaggtttatgctggtgtagctggtaatctagttgcttatgcttgtaaattatcttttcagcgcggtcacgatggaaatgtttcttttctttcaaagtcgcaattagttgatcattatgaaaaaacacttggagcattccatttcggtggtagaattatgataattgaaacaaaatcagctttgaaattaatcaataaatattttcaaaataaataattatgaaaactaaaaaattagatttagatatagacagtattggtggactaagttctctaacattagctgaagaaaaagctttaagcgatttttttcaaaagaaaaaactaacaaaaaagaaaactgagaaaaagaaattaatacttaaaaattagaacataccatatcagacatttgatgtagttgatgctttttgcttcaaaaatttggcaatcagatgaattattatctcaattgtctacattattggttttgtggcagaatcgaacagatttaaaaaaattaacgtgtaatcaggccaaattaaaaattttatccaaatttacatcaatccccaacgggacatccaaaccaaaacactgaagacatacaaatacagaccctacttccagtaagccaatctgttcaaatcctccataaaatggtgcgtaatttgtcctttatggatcacaaacaagccaaatggcgccaattgaagacaattggcgctatttttttataaccttgcttattttttattagtctaaagagccgggcccctcagcagccctagccccgattgcttcgccagttcgctccgctcgtgtgcagtgaaatccttttgtgccggggttcggcacaaaagattggaacgaatagcgggaagagctcccaaaaaatagcttcaataaaaggtgcaaacttataaacccagcgctgaatggtagcatgatcaacatgaactcctcacatgttcatgatctcttatacatcccggtaacttagggtaaatcttaatttaaaatacactgcccgaagaataatagattttggatagctctgacctttggtattcatttttttttagttttaaaattccaaagataaaagctattcccaaatgcgacagaacccttttaagaaatataggtctatttgaatagaactgatcaaaaaacgggctattctaatacataattaggaattaatactcaatcagttcttatctatatttgaaaaaggggttcaactttatttaaaaagttaaaccccgttatttttaaaacttacacactttttagactgtgtttttatcgataatgatttgtaagttcttattgcattgaaacgattacaaattcacttcttctgtttaactgatgttcatcttctgtacaagctacattatctgaacatttattgattaacttactttcgccatatcctttccctgatattctggttggggcaattcctcgttttacaaaccattcgattgttgcttttgctcttttattagacaatctcatattatattcctgagtctgtctactgtctgtatgagaacgaacatcgattttcatttcaggatattgtttcattacagcaagtactttctctaattcaaaagcagcttcctgacgaataaatgatttatccagatcaaaataaatcatcggaatatctaaggttttagccaaatctgtccctacttctatttgcttgatttgtttatttaatttaatatctaattcaggtttatcatttgttggctgaattgtaaccgaactttcattagtttcataatcttgttttgaaactcttacataataggtttgattgcattttacatcaaaattgtaacttccgtttttatccgaaattattgttgcaatttccttaaacttatcgtcaagcaaaattacttttgcatcggctaaagcttcgttcgtttgagaatctgaaacaattccaaataattttttttcacaatccagtctttttgtttctgtgaatttatagatatcatcatttccaattccgccttctttgttggatgagaagtaacctttacgtgtattgctgtcaattataaaagcaaaatcatccaacttggtatttacgggttctccaatattttgtaccagatcaaaagtagcatcttccttgatttttgccacaaatacatcaagtccacctaatccaggacgtccgtcgcttgaaaaataaagttcattatctccggatataaacgggaatgtttctcttccttcggtattaattgctgttcctaaattttccggtttcccgaatgttccatcttcattaataacaacactaaacaaatccgattgtcctaaagttcccggcatatctgatgcaaaataaagctttttttcgtccagacttaaagccggatgtgcaatactgtattgatcactattaaaaggcaactcaataatatttgcccatttatcatttacaaattcggctttgtacaactttaataaggtaattcttttattgtcttttccttttttacctcctagaaaattgtttctggtaaaatacatcgtctttccatctttggtgaaaaccggagaagattcattaaattttgaattgatttttttctcaaaccgaattggattatctaaagttccatccgcttttaattccgcagcatataaattcgtaaacgatttatttgtccatttaaatgtttttttaataacacttccagtatcacgagcagaagcaaatactaatttattattataaattgtacttccgtaatctgattgtttcgaattaattccggcatttgcaatatcaaatcttcctgaattcgctttaatctgctccagataatttttattgttttcgaataaaacgcctcttgtatcagtttttactttcgcattaaaaatttcaagcattttatctgctttggcataatcacccacagatttcaacgtctgagcatatctgtaataatattcaggttcttgttgctcgttaaaagcaaaaagggcgtcataccactttgcagctttcggtaattcggcattaaaataataggagtttcctaatctctgaaacattttttcatccttatatccgctttctgctactttttcataaatagcgatagcgtctacaaaagcatattgattgtactccttctctgctttatttaaaactgttttttgagccgttccgttaaaacaaacagacgacaaaacagcagcataaattatatttttaactttcataattagaaaaatcttggtgaagttatacgtccatatttatttaagaattcaaaacggaggaatatctcgtgcgatcctgaattataattcactaatttggttgtttcacgatcgtaagcataacccaaatacaaaccatctgtgatttgaaaaccagccagtgcacttaccgaagcgctccatctgtaagccactccaattacaaatttatcgttgaacataaagttagccgatgcatctacttgcaatggtgaaccttcgaccatttttgtcattatagccggtttaaattttacggtttcataacgatctaattcaaatacataacctgcgataaaataatagttgattttgtctttgtaaatcgcaacatcattatcatcataacgattggtctgaatgaaattaggaaccgataaacctacataagctttatctgtatgccagtaaactccggctccaatattaggcgtgaatttatttttaaaatcctgaaattgcggatctccctgatcttccggtgttaatttagttggatctaatttgaataaatttgctgatccttttatgccaaaagataatttggctgtagccgatgttggtatagaatacgaaaaatctgccgataagttattctcattcgttggacctattttatcattgattaatgaaactcctaacccaacgttattaccaactggtgtatttacagaaaaactacttgtttccggcgcgccatctaacccaacccattgggtacgatataaaccaaaaatactcagtactccacgtgatcccgcataagcaggattcacattaatggtattgtacatgtattgtgtaaattgtgcatcctgctgtgcaaagctcgcagttgaacaaaacagtaaaactaaaattaactttttcatttttttcatttttaattacagctcaacttcaacaagccaattaattagcatagaatattatttggtcaagtacagataacccgcttcctgatgaggagtagattgatggtctttatattttatgatataataataagttccctctggtaatccttttgaatctttgattgtaacacgtccttcagaaatacctctaaaaacaatatcattattattgtaatgatcacgatcaaaaaccaaaactccccaacggttgaaaatctgaaccgtattgtcaggataacattctaatccctggatataaaatctctcgttcttactgtctccatttatagaaaccgcgttgaatattttaattacacaaccttgtagcgataaaacagttggtttatcccccaatacactactatcatctgatttgtcttttacctcaatatgatcaggacttgttccaaaaacttcggcttgattcgatatacttcccgaattaatatcagcttgtacgatcgaataagttcctgtaaaggaagtgctatcctcttctcctacagctaaatttattgggcctccggtcatggtaattccagttaacggatctactatataaacattagtcaacgctacatttcctgtattggttactgtaaaattatacgtaatagtctcccctacttttgcattactgtcaccatcttcatcattgaaatgtaccgttttcactaaagcaatacttggtcttgataccaatatggttaccgttgcagcatcacaattcgaaagatttgatttttcgcaaatactgtacgttaatgtataggtacctcctggtgtattagccggaacacttattattcctgtggtagtgtcaattaccggaactgctgctccagatgtttttggaactgccggtgttgtcacttttaaatcaaccaggctaatcacaactggtacaccatttaaagtatccgaatttggattaccacctaatacgttccctgcatttggtgtccctgttattccatttacgcttggaatgttatcatcatttgcaattattgatgcccctgcaattaccgttactttgatttcatctgaaactgtcgcacaagttgccggagttagtttgtcgcataactgataaactacattataagttcccggtgtggttcctgccgcaacacttacttttccggttaacggatctaaagtaattcctgttggccatgttcctgacaccgcaactgtagcattccctgttgttcctagtactgccggaactccatttactttatcgttgcttgcaatgtttgcgaaaacagttcctcctgttgacacaatagttccattttcgaatattggttcaacaactggagttactttaatttcatctgaaaccgtcgcacaagttgctggagttagtttgtcgcataactgataaactacattataagttcctggtgtggttcctgccgcaacacttacttttccggttaacggatctaaagtaattcctgttggccatgtgcctgacaccgcaactgtagcattccctgttgttcctagtactgccggaactccatttactttatcattgcttgcaatgtttgcgaaaacagttcctcctgttgacacaattgttccattttcgaatattggttcaacaactggagttactttaatttcatctgaaaccgtcgcacaagttgccggagttaatttgtcgcataactcataaactacattataagttcctggtctggttcctgccgcaacacttacttttccggttaacggatctaaagtaattcctgttggccatgttcctgacgctgcaactgtagcattccctgttgttcctaatactgccggaactccatttactttatcgttgcttacaatgtttgtgaaaacagttcctcctgttgacacaatagttccattttcgaatattggttcaacaactggagttactttaatttcatctgaaaccgtcgcaaaagttaccggagttagtttgtcacataactgataaactacattataagttcctggtctggttcctgccgcaacacttactttaccggttaaaggatctaaagtaattcctgttggccatgtgcctgacactgcaactgtagcatttcctgttgttcctaatactgccgaaactccatttactttatcattgcttgcaatgtttgtgaaaacagttcctcctgttgatgcaatacttccattctcgaatattggttcaactgttgccgttactgtaattttagcttcagcctgatcgcacattggtgtaccggctgctgccattgcttttgaacatatactataaattacagtataaacccctggtgcagtaccagtactaactttaatagtaccatcggtatttaatgtcattcctgttggtaaataaaccgcacttaaattcacgtctgaagcgactatagttgtaccatgtaatttgtcattcaacaatacagaaactgtggtgcctccgttcaatccattaactactaatgggatctcatctatcgcatcaataaaacttactactgtacaggttgaacaagtaggatctattggcctgcaagtcgaacaaattggacttggatcggttgacttagctgttaccggagatcctgttggaggagttcctgtagctgtttgtgtattagagacagatataaaatactatacgtatttttttttttgaaaaatccattaaactgaataaatactcttacataacaagtttaaattcattgcaaaatatgatacaaaaaacaaaaaatatattgaatctactagtactaacataagtaagtacgtttatgaccggctgtcaaagcgatgaaataaaaactacggtcataaatcctgatgtaacttcagcaaaagaatggtttgacagtaacggttcaaatctagaatcactaaagtacacaaaaaaaatagactgggaaaatgcagccatatctattgaaggtgaggctaaaacaatagaaattcctcttatgctgtttgacaatacatctacaaatgttattggcgatactgattataggacttatatgtcattattattcatttcaaataaaaatgaagaatatcagatctttgatattatttacactacaaaaaataaaaatataaataatggtaaagaatttaatctctataaaactgattccatatattcgggatatatcacgatccaaaacagtaaaaacaaaattatttattctggagaatttcaaaacggtcaacatattagatatcataacagagctccaatacagaatgtcacttcaaaatacatatgcacatactacgttacagttggtcctattacgacttgtagtaattggagttgggtacctgacaatataccagtgccaggagttccctattttccaggaggtccgtcctttcctggcggtcaaccacctccagttataaaactagatccctgtgcacaagccgcaaaaatgtctattgacggaaaagaccccgtttttctatccgcaaaaaaaaacatccttaatgctgatccaaaaatagagcatagtattactttaactagacggaataatcaattaggacagatagctatgaatagtggtggcacttctagtgtaaaagtaaacactaactggcatggatcttttgctgccatgcacaaccacccaaataatactccactatctgcaggtgacatttatactggtataactttaaatgtaaacaatcgtaattttacaacttcgtacattctaacgggaggagaggtatatgcaattgttataaccaatttgcaagcagcaaaagattttgctgctgcttatcctgctgatcagataccaggctacaatcccgaatttccggacgttctttttgaccaactgcaaattttagtcactacctttggttcttctattgatggcaggactgaagcaatgtcagtaattttaaataaatataatgcaggagtcactttgatgaaacaagattctgcaggacaattcaaaccgtttaatactaaagaatctatactacccaatggcaacaagtcttacacctcaataccttgtaattaacaaataattcaaaaaaaatgaaaaagctattaaaaacatttatacttctgctattactaattaactatagctgcaaagcacagcaattggtacaaactcctaatgatatatttaaattaaaaacaaatgaacagcagtttctcaataagcctctgaaaaaccttctaaaagaaataaaacctgaaataaaaacggcttttgctatcactgacagtccttcatttttcacttttagttttttgagtccttcggaaattaatcaaaaagttgttggacgaaaaaacataagcttttatgtctatgtaaaggaacctgttgattggagtgatgataaaaggcctaagggaaaggaatatatatggacagcacaagatattgaaaagtatggtaacctaacagtaattaggattaaagtaattgaaagaatagagaactaaatatataactaagaacaaatcctattttaaattgtactaaccctcgatgtttcccatttttcaataatagattagacaaaataaaatcgcacacgattaaccttaagctttacacaagcattctaattgcattacaagtcatcaaacaaaaaaaggctcgaacattacgttcgagcctttttgtattcagtattctaaaaaaaactagaatttataagttaaacttcccataacagtacgtggagcctgaacatttattgtcgtataaccattaaaatacaattggtctggtaagttatttacttttaaagacactctgtatttgggctgatcgtagtacaaagcagtattaaccacagcatatgacggaagctcaaaagtttgaccaggtccgttattgtaaatgtaggtagcgtctccataattccctccaaatcctagacctaatcctttcagttttgttttttgaaggttatagctgaaccagtaattgattagattttcaggtcctgcagttacaggtcttaaatcatttaatttagagttattattagagtaccccacaagaaggttcaatcctggaattgggttagctgtaagctctacttcaaaacctttgctatattgtgttccgttttgtatgctcgcatttggaagattcggatctgcgattacaatattgtcaactttgatatcataataactaaaagttgcgcttactttattctggaaagcattcacttttacaccaacttcaagctgatttgctttttcaggatcaaactgtttcatttcaagcttcccgccaacattagcatttaagaatcctttattggtaaaactattttggtaatttccaaaaacagatacctgatcttttacgatttgatacacggcaccaaattttggtgagaaagcattttgagaaaaattgtccgcttttgtattcgaagcaggatcaaatgatcctttattttgaaaatgatcaaaacgtactgctgccgaaagaattaatctttctgtaatgttgattgcatctgctacgtaaacactatatgttgctatagaactgttagtagtataaggaggattcccttttccggtaagtgcatcctttacatttgttgggttaaagtcataataattagtcaccgctcctgtatactttatggtatcaaacgccgcataacccggtaaactttggtacactaatttatttgaaccgtaatagatatcaccacctactaaaaagcggtttctcatggatccaattttgaaatcaccattaaagttttgttggaattcgatcgcgttatcttttccatttgcatcccaggcgtttcttgagaattcctgatctttcaaaaggtaaaaccatgtctgtaaaccacttgctttgttagaactgctgctgaatacggtttgagaagtccattcttctgaaatttgataaagagcctgtgcgaaaacgtttaatgttttggtgttggtcataaattcatctcctaaaaatgatcttttgaaatttacatccaaattcttagcattattaacgcctaagtcagcaatagaaactccaaaaggaagataaattaaaggcataccggagttgtcctgatttccaatttcggcatcgatagagatggtaagtttatcgtttactttataagcaaaagacggcgctacgaagaaactctttgaataaccgaaatcctgaaaagtatttgcatttccaaaagcagcattcaatctgaacaatgcggtatggtcgtcattaattggagtattgatatcggccgttaaacggttaaaaccataacttccgttttgatatgaaatttctccaccaaaattatcataaggttttttagtcacacgattgattaatccaccgtaagaagaaaccacatttccaaaaagtgtagctgatggcccttttattacttcgattctttctaaatttaccgcatcagtattactgtttacttttccggcaagaccatttcttaccaaactctgagtggtaaatccgcgtaaggaataccatgaagctccgtcaccggcacgattagtggctgcccataattgatataaacccggtacattttttaatgcctcatcctgattggttaccaactgatctttgatcaactctttagtaaccacattataaacctgtgcattttcaaggtttttaattgtcatcctcgacacatactggctttcagatttggtatatttattagcattcccttttacaaatacttctgtaagtgcttcagatgtagttagcagtgtaaaattttcaacaagattacttcctgctgaaacttcaacatttttttctttagaggaaaacccaattaccgaaaccttcagaatataatttccgggtctgatgttcttgatctcataatttccctgagcgtcagtggtagttccaatctttgttcctttcagtgttacagaaatattatctgctgcctcatcattagacaatgaaaccgttccttttattgtacccgtctgcgcaaatgatgcagaagccgtaagcagcatcatcaaacagcccaaaagtggcaatagtacttttactttcatgttatttagaattatttttaataacgcaaatgtattatttgtatcaaatcaaaccaaattattttgaattattctagataacaaccctgttttgatacttttaagtactatttttcattcttttacttaaaaaaaagcaataatcattttttctaataaaattaaattagaatcttttgatgaactccatcatgtccccaatggtttttatatcttctttttgagtattaccaagccctctctccttttcaatatgtaataaactgattaacatcgctttttgcaatccgtttaatggatcactgctcgtatcaggctcaggaagcagatcctccaatttcatttcccaggggatatcaggccactccgttctcttttggctcgaaaaaacttcagtaaaaggccgaattttagcatctttatccctatcggttaacggatccagtccccacttctggcataccgtttttataaatgaagtatgttcaaactgcccgttgattatggtaccgggctgaatataagaagaaaccattatcataggaacacgtaccccaaaacgatcaaaagtaaaatcgcactcccctttcataccggcaacaggcggcactgtctccggcggactaacatggtcataacaaccaccatgttcatcatgcgtaatgataaaaagtattttatctctttttggactattcttgatagcagtatatacctctcgtatcaattcatcccctaattttacggtaccaacagttaaagcatgattcactgccgatggatgctggtcgttgtgtttgtgaagaaactgcggttctacaaaggaatattgtggcagggttccaaattctaaatctacaaaaaagtcaagatgtccgtgagtattgtattttccttctccaaagccattcacaatattggtcaggcttaacggtgcaataggtgaatagactttccacgaaacatccttttcattcatgcgttcaaaaatagttggaagcgaccaaacctctttgatccacgaatccatatcatgcaagtcagcatcaattccggagagtccactcccatcctcaccaagaggattaataactttacctcctgaactggcagcatgccaaaaggcccgattgcaataagtttggctcggtaccgaacaataccaatgatcaaaaaccgcaaattcctttgccaaagtggccattgccggaatctgatcgggctgaaaacactgcatgattacctcatactgttcgtatgtggggctgtcaatacgataggttgccctcagattactctcgtaatcgttgacaaaaccattcatacccgccttaggaggcacaggattaggcagattgtaaggttttgtcattaaataatcagataacccaacattagacaaaggctcaatgttgttgaaaagctgcgtattcacatgtggatattcttcacccggatcgggataaggtgtctggtaatttgcagcacgtgaaggagaaatactggtattccctaaattattagttactcttggaggtattggattggcatactcaatttcaggattataaagtccgtcaaaagacttatttgacggcacttcttccttttcatagagatatcctaaaagattgtcgaacgaacggttttccagcattaaaactacgatatgctcaaaagttcctaacccgtcaaattgattctgattttccattttttccgtttttttttagttctaaatgtaagaaaataaaaacaaataagacttgagtagttttacgcattttgtgaatttcgattgaaatctataagcaaacgttcttaccaaatgccaaatttatactggtatcaaaatacgataagttatttgctatcatacctttgactactttatgtttaaaatctaaactaaaagtagttttggttttgttaatttctaatcctaaaatccctttggattgatacaaactaacccatcttcgtaatacagaatgatcaataccagcttcatttgaaatagcagtataggataggtgattctcaagatactttaaaacttgttcaagtttaaattctgctgtaaaatttctttttttattcataaaaaatggccccaaatagtgtctaactatttgggggcagttcaaaatgagcggggtttagtttttataatcttgttgttacagatcgaaagaataacaaattgaaagtttcattttatttatttaattccctaaagcactaatctaattctgctcttgaaaacaaatcaagaattaactctttattttcacaagcttctttaaatgaaataataaaagattttaaggcttcggaatctgaagaataggcacaaaacatgcttccttcgggatcaaacttaacaatatttattaactctgtttttttttcttctaaaaaaacttgtgcaagagagccccaatcatatccatttccttcaaaaccttcttcttctcgtgtttcaaaaatttcagttttatactccccaacattaaggcataccgaaacactattttcatgttcaacccaaaaaaaaggatctattgactccataaaatcatccaaattcatataatatttaaattttatctagttcagaaaataataaatcagctgattctttaacaccatccctaaaactagcgggtattttttttccacatctttcgaaccaggcataaaaagtttctttaatttggtttctgtttagttttgctacccttctattcgccatttcaggatatttcttactcaaatatacaaaaacatcaatatgaaccaatagagcttggctagcctcgtcagctgttcttaaccattcttctacctctaagatttgttttattgccaaattaaaataacgagccggctctaaatcagccatttgatttccttccggtgctgcactgtaaactttcatttattctatactattcttagaattataaaattttgctaaataagcagcatggcaacaatttggcaggattttcgcttgtttttagagcgtatgctcaactaagtgtttttgcattgttaagtcagaaaataaaaatgaaataataaaaaacaagactgattgttaaggaccatcagaatgaataacaaaaaagtttaattaaataaataagtataatcatggaaaaattgaattttatagatcctctattacacgggattactccaaaaccagcctctaagttttctgtaaaaaatttaatttttgcaggtgtaggaactcttgtagcaggtgctattttgaaaaaagcgggacaagataaaactgctgccgttgttggaagcctggctattcctctattggctacagcttgctacaaacaagtttcaaaaaacaataaagctaaaagagatcttaacgtaagcagcggtatcgaatacaatcactagatttcatctgtttcagatctatttcgaaatctctccaaaatagtttagtctcgaattcatgaattttgcctggtctcatcaggcaataattcatgaattcgtggctatttttttatcggataaaaactaatgtatattgatatttccttccacccaattcaatgctttattgaaagattcttttttaaagccaagaaaatcgccgggaatgacagaaccaaacccattcgtaaaagaaataatctcttccgaatctgtaattatagcggctctgttccattttccaaaatgttttaaacccagtaaggcatcttgaagccatacccctgaagtagaagcctcagtgtctgtatccaaaaccaataaaaaattgatttcgttggtttgttttactaaatgttccactgcggggatcacgacactcagaaaatcttcatttgttaccactgccaatgcccgaaaagcgacaatattgtctgttgtatcaatttgatgtatcataccatttatattttaaattgttattaatcctgatctctatatctttttcacctgtccattagaagagctttccgatactaatcataacacactttaaatcgtatcacttctaattgtttaaaatttcatcaaagctaagaaccaataagttacaaatttacaaaggtttacactcattaaacaattcctatttttaaaaacctttgaaagtagtactccatttcattcgtaaacaaaccgtatccaaaacacgattagaatccttaaaactttacacattttaccataaaatttcagtaaatttatgtccgcacacaattctaaactcatggaaacaaaagatggaagaatcgcactttatgccaaaaaccgaaaagaatggcgcgattggctacaggaaaacagtcagatcgagaaatcaatctggttgatcttataccacaaaaaaagtaaaacagaaagtgtaaatcttatcgaagcgacagaagaagcactctgttttgggtggattgacagtttgtgtaagaaacgggatcctgaaagttattatctgacatttactccaagaaatgccaaaaaaagcaaatggagccaacccaataaagaacgcgcagaaagaatgattgcagaaggtttaatgacagaatacggtcagctttcgattgatctcgccaagcaaaatggcaaatgggaatcggtttaaagaactttaatgactgcctctccatagtatggtcaaaccacaaaatttttacattattagtaccattttcttagtggtaaatgcaatttgatttgtagttttaggcttcaaagagtaccactgttcacatccattccagtaaatagttttggcggaagcaacaggaagttgtccaataaaaaccattcaacacaaaaacaagaaattaaaaatcagctcattaaatccttttacatcaagtataaatacaactattccagtctcaaaaatacttgtttttagacgaactgacagtccaaaaacgagcttctgacaagtactgccatcaaacaaaaaaaaaaaaaaaaacaactaacaacataattaccaatactttaacccgcaacatataaagtaaaaaataaatcacaaataaaatccaaatgcattcaagcggcaatccattcggaaacttaaaacacctaaaaaccaaataacaatgatcgtagattcgttacaaaacgcagccagatattacggcctgcatcctaattttaaaaaagcatttgattacgtaaaccaaaatgacatcagcattcttgaagaaggagcctttgaaattggcgagggcttaaaagtaattgtaattgttggcgaaggcaccactaaagaagaaagtataaaagggtttgaatgccacgataaaaatatcgacatccaaattccgatcaaaggaccggaaacttttgcctggaaacccagagaaaaatgcattagtccgaacggagaatacagtgatgaacgcgatgttcgtttcttttacgacaaaccggatatgtttttcgaattacaggaaaagcagtttacaattctatttcccgaagatgttcactcagcaatgataagcgaaagttcacttaaaaaaattgttattaaagtaaaagtttaagtttaagtttaagtttaagtttaagtttaaaacaggaacagcattcaaaacactatcaatcacaaaattttacatggattcaatatttaatctaaaaggaaaaattgccttaattactggtggtgccggcgtactgggaagtaactttgcgaacgttttggccaaacagggcgttattaccggaatcgtttcccaatctatcgaaaaagccaatacaaccgtagccgcaatagagagtaaaggtggaaaagcttttgccattcaggcaaatgttttgaacaaagaagaactggaaaaagccaaagattttatcgtaaaaaaatacggccgtctcgatattctcatcaatgctgcaggaggaaacatgcccggagctaccatcagcccggatcaggccatctacgaccttcaaaccgaagatttgcaaaaagtaatcgatttgaatattattggaacgatgttgccttcacaagtattttcggaactttttgctcaacaaaaacagggaaatatcattaacatctcatcggcagccgcacaacgtcccttaacaagggtggtaggatatgccgcttctaaagcagcaatcgacaatttcacacaatggatggcagtagaactggctactaaatatggtgaaggaatacgtgtcaatgccatttcaccggggtttttcataggagaacagaaccgctctctcttactgactccggaaggaaaactaacgccaaggggagaaaaaatcatcgaacatactccaatgggaagatttgggactcccgaagatgtcaacggagctcttttgtatttatgcagcgacctgtcaaaatttgtcacgggaacaattctaaaagtagacggaggatttgcggcagcaagtatttaaaacgaaaacagaaccttatcaatcctatcgtattaccaaatcattaacaaaaaaagaaaaaaaactatatgatttctgtttaggattttcttactttgtgtgaacacttaaaaactattctaactatgaaaaaaattaatttattggtaatggtcttattgacagctttttcagttaatgcacaagacgttaaatttgctcctttggatgcgagtccggttgatattgcgtattctccaaacaaagcggtaaaattcaagaaaaccgataatccggctccggcagttaaggttgtttattcaagaccttctgttaagggacgcgctatttttggtgaattgattaagtttggtgaagtttggcgtgtaggtgctaacgaaaatagtgaaatcaaattttacaaaccggttactattggcggagtaaatattcctgccggaacttacagtttatttgctattcctgaaaaagacaaatggaccatcattatcaataaagaaattgatttatggggtgcttatgcgtatgacgaaagtaaggatattgcaagagtaagtgttcctgtaaaaccagtatccaacacaattgaggccttatctattgcttttactactcagggttccgtaacgaatttggtaattggctgggacaaaacaactgttgaagttccaatcacaataaaataatagtctgcacaattagcaacagagataaagagatacctaacggtgtctctttttttatgcttcaacacaaaacaaaaatgataaaaaagagaaaaatcattatgatttagttctctgtaatttatttttcatccggttatactttatacgatgaagttttgtatttttatgaatatcaatgaatttaatttttaacttaatcaaaaaatagatgggaaaatttgtaattactaagagagccaatggtgaatttcaatttaatttaaaagctggtaatgggcaaactattctaacaagtgaaggttatactaccaaagcggcctgcttaaacggaattgagtctgttaaaacaaactcgcaggacgacggaagatttgacagactggaatccaaaagcggaaaaccttatttcaacttaaaagccagtaacggccagattattggggcaagcgaaatgtatgaaagtactagcgcccgagataacggaatagcatcggtaaaaacaaacgcacctgaagcttctacagacgatcaaactgcataactgcgatacaaaataataagaaatggggctactgagccccattttttttcatttcccaagactaaatcgctccgaatttttctttataacgacgtaactcttcttccgttttgcttaacaatttctctaaaagcacaattttatcttcatacaaagcctttaaaactgcgctattatccgaattaatctgaatacttccattattgtttcctctcactttattaaaactattaaagtatctctgactgtcaaaactgattacgtcttctacactaacttctaaaatcctggctatttcaaccaatttttcatacgaaagaatcgtttttcctttctcaattttactatatcctgcctgtgtaacacctaactgatctgccatatattcctgcgtgtaattttttagttctcttatgctttttattttactttttatcgaagaggtcataattttatttggggtattttgtatcgctaaaaaccaaccgctattaaacttatagtagtacagccatacttttttagtatgcgatcatactacttcaatcgtaggtttatgaagcagcagattttcatttttttctggtggtaataataaaaccataaagtatggcaagggctataaccaaaagatcattttgggaaatttcatctactaacattattaaattttatagttttgtattcgttttcttcaaaagtctgttaaaattcaggtttagaaactcatcgatctgtttcccgatttcttgacggtctaaaaccttaatttttactttgatctcttttttatatacatcttttacaataacataatagtcaaattcaaaagtattatagaatcttaaaatgataagaacagcatatactataatcgtggggccgatataatacaagtcatttaaattggaaaaaaacatacaataataagccaaagcggtagtcagagtaaaaactccgttttcaagaagataggtcttcttttttttgagtaaaccaagttctgtaatttcattaaaacagtattgccatcgttttgaaccatactgaaactgaacctgatcctgagtaagggtaatgaacatagtaattaaagattattaataaaagacaagaaataattatactgaataccaaattcagcgataattaaaagtggtttatattcctaaaaaagcaaccattagcggtctctattttttgaataaaactctctttcgcaatattacgcattctatgtattttctttcttacaaacctcctaatagaatataactaactgttgtaattaattctgaaatgtaaacttttacctatatccaatggtgtagaccgttgattttatctctattagatttcatttttcgtcttaatgataaaaaacaaaaaagcccttaatcagaatttgtttaagggcttaccaattatcttcttagaattaaactatcccaatccggaggtcttcaatttttgaaagcggaatctcgggattggcaccgggtgacgcagcaactaaggcacctacagcacaagcaaaatcaattgcgtcctgaggcttttttccggtaagcaatgaagtaatcaaagcagctaaaaaagaatccccagcccctactgtatcaacaacttttacagtataaccgtaattctcatacaattgattctcccaaagcaatacggcaccatattgccctctggttacacaaatagcattcgtactagttttctctgcaataaaataaatattttcttccagtgtggtaaaaggcgaatgcagtgctgcggaaacttctaataattcttcatcattaaactttataaaactggcggcatgcatcaactgttctaaaatctcataggaataatgaggctttcttaaattgacatcaaaaactttataaacatttgtctgtaacaattcttcaagagattttctcgatatctcatcccgacaaactaaacttccaaaaatcaaaacatcggcattcgctgccaaacttctggcaaaatcactcaaaacaatcttatcccaggccgcgggataatgaatgacataactcgccgaacctttctcgttcagggtcacatgaaccagaccggttggaaaatcttctgacttgattatcgcttctgcttcgagtccaagattttttatatgattaataatggcaacaccatcttcatcatttcccacacagctaatcattgctgcattgcagcctaacgattgcattcgcagggcaacgtttaatggtgcgcctccaacctttttttctgcagcaaaaacatcccaaagtacttctccgtaggcaactgcctttagactttttccgttactcattctaaaaacaattttatattagcaagtctgtttaacacacggtaatattgatttccttccttaacaaaagattgtctaactctttttaccgatgtgtctaaaatacaactataaaattaaacttcgatccgggcaatactaaaaactgctggttgatttaaaaaatgattcaatagaaatgatggtttacgtcttgtaatttagttcatagtgcgttgcactatgtttgtgcttttaggctttcagccttttttatggttctagaacactaattccaataaatacaatcatctaaagaacttaaaggactaaaaaaataaaatctcaacattttacatacttcttgttatttatttaatttttaacagaaaatattaaacaattgttgattgtccaatgtgaacgttatcattattaaaatagagtaaatcgtctttactgaagataaaattggatacaaagtcccctacttcgtttgtaccgaactttgaatccggttttaaatcaacggttactacttgaaattcgattgctttttcgactgctttataaatcatgccagcttctttcaacagaccaaaatgttctaataacatcgccgctgataaaattgaagcaatcggattggcgatgttttttcctttcgcctgaggatatgaaccgtgtatgggttcaaacaaagcattcttttcacctaaagatgctgaggctaataaaccaatagatcccgttatcacacttgcttcatctgataaaatatctccgaataaattttcggtcaaaatcacatcaaattgttttggatttagaatcaattgcattgctgcgttatctacaaacaaaaagtctaaagcgacatcaggataactttggcctactttctgaacgacttttctccataaacgggaagtttctaaaacatttgctttgtcgaccatcgtaagtttcttgcgtcgattttgtgctgatttaaaagccaaatgcgcaattcttgtgatttcttcttctgaatattcacataaatcggaagcgtgtgtaccttcctcatttaaggttttagctccaaagtaagcacctccggttaattctctgaaaatagtaaaatcagcaccatcgataatttctctttttaacggagaagcatcaatgagtgatttataaggttttatcgggcgaatgttagcaaacaatcccaactccttacgcagttttaataatccttgctccggacgtactttcgctgacggattattatcgtatttaggatctccaattgctccaaacaataccgcatctgtatttagacaaaggtttaatgtctgctccggcaaaggatttcctgttttatcaatggcaatagctcccataagcgcctcttcaaaaacaaattcatgattgtacacctcgccaatagcatgtaaagcttttttggcttgtaaaattacttctggtccaatcccgtctcctggtaaaactgctattttcaaattcataacgtctcgttctttatgtatttaaatccttttttctttagtctattctctttcttctattctctttcttctaagatctttgctctcttgaactagtttctgattaattctccctgaattttagcagcttctataatttgatgaatatctgcatcaattacttccttcttaatatcggcgaatttcaaaaattcaatgtatacgatatccagttgtactttagtaagctcgtaacctacttttttagcgcggtaagccaatgcagctcttccgcttcttgctgttaatataatagaggactcatttacacctacatccagcggatccatgatttcataagtggctctgtttttaatcactccatcctgatgaattccggagctgtgcgcaaaagcatttgctcctacaatggctttgtttggctgtacaatcattcccatactttcagaaactaaacggctcatctcgtttaattctcttgtattgatattggtgtccagatttaggtaaggatgttgtttgaagatcattacaacttcttctaaagctgtatttccagctctctcccctatgccatttatagtacattcaatttgtcttgctccgttgatagcacctgcaatggagtttgcggtagccattcctaaatcgttgtgacagtgacaggaaagggttacattttcaatacctttcacattttcttttaggtattttatttttgctccgtattcttcaggcaaacaatagcctgttgtatccggaatattcagtactgttgctcctgatttaattacttcttcgcaaacttttgcaaggaaggcattatcggttcttccggcatcttcggcatagaattctacatcttctacgtaggatttggcatgtgctacagcgaattttgctcttgcaatgatgtcttccggagttgtgtttagtttatggagtatgtgagattgagaggttccgattccggtatggattctaggtttcttagcgtgctttaaggcagctgcagcaacatcaatgtcgttttttacggctcttgtcagaccgcagaccgttgcattttctacaattttacaaatctcagaaaccgataaaaaatcgcctggacttgacactggaaaacctgcttcgataatgtcaactcccattttatcaagtcgttctgcgataactagtttttgtttcgtatctaacttacatcctgggacctgctctccatcgcgcaaagtggtgtcaaaaatttgaactttctctctattcatattcatttatttaatgtaatttcacatcttgataacaaatatatattgtactttgccggcacgaaattcattttaatgaaattatactgttcataaaacattttaaagcaggttaattaactagaaaccaataagttatattattatattttacaatggctaaccatcaaaaagatttcttatttgtattaataaaatcactttctaaatccgaaaaaagacaatttaagatttttgcaagtcgtttagagacgagttcgaataccaaattcatcgaattatttaacattctggataagtctgaaacttatgatgaaaagctgattctcaagagtggtattattaaaaaggttcagctatctaatttaaaatcatacttatacaaacagattttagtgagtatacgcttgaatattccgagtcagaatattcgttatcagttgcgggaacaaatcgattttgctgttattttatacaataaaggtttgtacaaacaaagtttgaagattctggacaaaacaaaacaactggcgcttgagaatgacgagaaatacatggcatatgaaattgtagaattcgaaaaactaatcgaatcgcaatacattacccgaagtattcagggacgtgccgatgaattggtgattcaggccaaagaactgaattatcgcaacaccatttcaagtaagttatccaatttatcgctgcagttgtacggaatcatgctaaaaaccggctatgttaaaagcgacgaagagtacaaatacattgacgattacttcaataagcacatttcaaagctggacgaaagtaagtttggttttagggaaaagtattggttttacaatgctaatctttggcgtagttttctggttcaggacttcttagcgagttataaatatgcctacaaatgggtaagattgttttatgacaatcctaatatgatttatttgaatcctgtctttttcttaaaagggaatcattattttctagagtcgctgtatatgttgaaatacaagtcgaatttcaaaaaatatctgacgcttttagaagaaaccattgctgatccaaggtttccggtaaatgataatattgcgtcgctttcttttctgtacgtttataataataagttgaaccttcacatactggaaggaacttttgctgaaagtgaatatctaattccggagattctgcaaaagataaaacttcacagcgaacatcttgatgagcatcatgagatgttgttttactataaaattgcctctatttattttggtactgaaaagtacaatgaatcgattaattatttggataaaatcatcaacaataaaaatctgtcgatgcgtgaagatttaatgtgctttgccagacttttatccttgattgcgcattacgaattgggtaaggattattatctggaaaatcatttgaagaacacgtataagtttctcttgaaaatgaatgatttacatgaggttcagaaagagattatcaagttcatgaaaaatctgaataacttctaccctgccgatataaaaaaggagtttatcaagatgaggactcgttttatcgaactggagaaaaatacgtatgagaaaagagcctttttataccttgatattatttcatggctggaaagtaaaattgacaacaggaagatcgccgacattattaaagagaaggcgaagctgaacagtcgatagcatctagataattagagaattagaaaatgtgatagggaactaattatcaaattttctaattatctaaattaagattttaaaaaccagtctggtttgttctgaacaagatgaaatctattccccttattctataatattagaagtcgttacataaaaatctttatctacttctactttacgtgattcatcagtagttttttctgattgccattcggttgttggttttaaccatgtttcaactccgtttaattttactctcacgggcatgtcaaatttagagacacaattggtccagtggtaaccgaaagttccgtttttaaacatatactcaaaaaccgggatctttgttgtggtcaaatattgagcatatactctattaaaattaattccggattgtgtgttgatgtaatcctcgatttgcttgcttgtcacagtttggtgataaaaagtcttatttaaacctcttaaaatcgatttccatttggcatcatcatttatgatctgacgcatcatgtgcagcatgttagctccttttggatacatatcgcctgacccctcgttgtttacgtcataattaccaatgataggtttatcgttctgaatccctttacggcatccaattacgtactctgcagcagcatcttttccgtagtaatactccaggaaaagactttctgaataattagtaaaactttcatggatccacatatcggcaatgtccttgtacgtgatattgttggcaaaccattcgtgaccagattcatggatgatgataaaatcaaattttaatccccagcctgttccgcttaaatcacgtcctaaataaccatttttatagccattcccgtaagtcacactactttggtgttccattcccagataaggtacttcaaccagcttgtaactgtcttcataaaatggataaggtccaaaccagttttcaaaagcttttagcatttttggtacatctttgaactgttcttttgccaaagcaagattgtctcttaaaacataatagttacaatctaaatctcctttttcgcctttgtatacttctgagaaattaacataatccccaatattgatgtttacaccatagttgttgatgggatttgaaacataccagttgaaggttttagttccatccttttcctttttaacgctttttaatcttccatttgaaacatcggtaagatctccgggaacgtttacgctgatcatcatgttctcgacttcatcgtacatatgatctttgttcggccaccatacacttgctcccagtccctgacaggatgaagcgataaaatctttaccgtttttgtcctttttccagctgattccaccgtcccagggtgccttaacggcttctcttggttttccggtaaaactcactaccacttctttggtatcacctattttttgcttttcagtcagcgtaataaaaaaggcatttccatctctcttaaactgtaattcttttcccccctgtgttactttcgtaatttgcataggttcctgcaaatcaatctgcatcttgtcgtatggggttaaaacagtataacggattgtattcgaacctgaaattgttctctcttttgggctcacttttacatcaagatgatagtattttaaatcccaccaggctctttcttttgtaatgcttccgcgtaaagtgtcctgatgtgtaaaagtagtttctgacttattcaaaagtccttgtgcattggcagtaaagccaaatagaaaggcgatacagacgccacctaagtattttttcatatgaagcagatattttcttttagtcgaaattaagaaggctttttgagccgtttacacttcaacaaatgtaaacattcgaatcaagttttgactgattttatagtgaggattctaaaaattaatgttaaaattcgtttattcttctgtattttagcctatcaaattcatatatgttatttatgagaaatcttaaaattactatcctgctttgtttgatgtgctcgatcacaacttattcgcaaaatattcttattccaagaactattcaaaaagttaatattgatggcaatttatcagattggaagactccttttcttgggccttttgtggttcatgattccggaaaaaaggcgactcaggatacgtatgtttcttttgcatgggacaatgataatctgtatatggcctatcgttcgattgattctaaaattatgggtaaggcacagcaaaaagatactgaaatttttaatactgatgatttagttgaaatttttatagatccggatggtaatggggagaactatctcgaaatcggcgtgaatgcctactcttcttattatgatttactgttaaagtgtatctcaccagcttgtggcggatggaacatgagtatagcgtttgatgttttgggattggaaacacaaagcaaaataacaaacgaaggattcaataccgaaattaaaattcccttctcgagcctgaatacgattaaaaacggtaatttttcaacaccaaaagcgggaactaagtggcgaggaaatgcttttagaattgattacggtaataccactgaatatcttgctttacaagcttataaaagttctagatttggttttcatcaaccacaggagtttgctgtttttgagtttactgaatagagggattttcaattcattttaattctgccaggaatgaaataattatagttaaaaattaaatacatttttgagaaagctccatcggagcgttatatttgatgatctacaggtaatatatatgccgccccgctggggctctcgtgagaggtgatagtttttttagaaatatttcgtcccgttgggacttttcattgaaactaaaaaatactgacattatcagttcatggataattttgtttaaccaaatatttgtaaattcttgatttggaagactggctgtatttcctttattttaaaataattagtataattcactaggaaattaaaggtactattattttgtttcatgagataaatttcaaaaatagatttattactttcaaaatatacattttgaaaaaacttgtcatttgaatcgccataaaatttataagtttctataaacattaaaatgcctttcttaaaaacctctggagtcgagaagtctttcggaagaaatatatttataaaactattattatctatatactattaataatatctatgtagggcaatatttcattacagttattgatgcaaatggctgtaaaattgataaaagagacttagacaaagtagatcctctctttattaaattaactcagatcaacattgtaaaatgttacggagatgcaacagccagtgtgaaagcaattacttcaggagggcttccgggttattattacaaatggtatgatgcaactaattctgcactgatcattagcgaaaatgagactttaatgaatgctaaagcgggaacttattatgttattgcaacagattcttttggaaaatcgataaaaagcgaaacgattacaatcactgagcctactccgcttgacaattcgctttcctctgaatatacccgttgtggtgatggaaacgattggacaattacctcagccgcattacaaggtacagctccttactcttacttatggagtacaggcgccagaactgctaatttagtagacgttcctccaggaaattattctttattggtaacggatactaatggctgtaccattacaaaaacaattacactaattgctccaccgcatctggcagcgtccgaagtaattaagatcccaacttgttacgccggttctgatgctaccattactgtgactcctataaacggtattgccccttacacctatttgtggaatacgggagaaacatcaaatatactaagcaatgcctcagcaggagaatataccgttgctgtttccgacagtaaaggctgtatcatcaatcatacctataccattgttaatccaccgaaagatgttattaatatcggagaagatgtgactttatgttttgatcagactttaaccattaatgccacaattaatgacgataaagcgacgtattcctggacctccgataaaggtttcaagagcaataaagctataattacggtttctgaacctgcaaattataccgttgtagttaccaacaaattgggttgtgaagctacagataccctcaaaatttcaagtcagaataccccaattagtgctgaatttgccctatcgagtcaggtattcaaaaacgaaaaattcataatcgttgacatcagtaatcctgacgccgatgaaatcgaatgggtaattcctaccagtgcaaccgtaatctccaaaaacaaagattttgccgaaatcagtttcagtcaggccggcgaatatgacatcacgctgaacactaaaaaaggaaactgtactgcttttcaaactaagtcaatcttagtgactgaaggagaatatgaagaaaacaatccggacgatcagactttcaagaaatttgatctgaaaatctatccaaatccgtcaaaaggaacttttactgtagatgtactgctggataaagtaatgccggcacatgtcaaggtttataatttgaccaacaacttactgatagattcaaaaacacaggaaggcaaagacaattacctgttcaactttagtttgacaggtcttccttccggaatatattttgtcttattcgagtcacagcaaggaagtaaattgagaaaaatcattattcagtaaactctaatttatccagcaagccaaaattataaatttcaaatactaatggaaatcaagaaaacaatcttggtttccattccccataaagaatgattttaaaaagaataattttaattacactactgcttttcaccggtacctttgctttttcgcaaaactttaatgtacaggagctaggcaaagcgaaactaataaatgtcagtggtggtgtatcagccaatacggtattctattccggtaatgccacacgagagcccttcagttattttttgaacggaaacatcaatttcaatattgccaatctgtacaacattccgctttcgttttcctataccaatcaaaaattcggatacaacaaacctgttttaatgaatcgtctgagcatacatccttcgtataaatggattactgctcatattggagatgtaagcatgaccttctccccttacactttaagcggtcatcaattcacagggtttggagtagatttgactccacaaggaaaattcaaaatcagtgcgatgtacgggcgattattgaaaagtaacgaatttaattctgcttatcctgatattctgcctgcctataaaagattcgggtatggatttaaaaccgcttattccctggagaaaataaacctggggcttaccctgtttaaagcaagagatcagatcaattctttaaacaaccctgtaccctttgaactggatgttgctccaaaggaaaatgctgccattagttttgaaactaattttaaactttttcaaaaactacaaatctctaccgaatatgccagcagtagtatcactgaagatttaagagttgtggcaagtggaaaagcaaaaggagtttcctcttttctattgggtagaaacagtactaccactagttataatgcctttaaaggacaattggcttacccggccggaaaaggaactttaggattaggttacgaacgaattgatcctaactacagaacttttggaggatactattttaataacgatttagaaaatgtaaccgttaatgcgactcaaaatctgtataaagataaagtgtcgcttgctttaaacttaggacttcagaaagacaatttagaaaagcagaaagaaagccagatgaaacgtttggtcacctcagctaatgtcgatttgagacccaatcaaaaattaaacctgaacctgaactactctaactttcaatcgttcaccaacagccgtaatcagtttgactacatcaatcaggtttcaaattacgagtatttggatactttgaacttcagacaagtgaaccaaaatttaggtctgacggtaaattatctattaaaaaatgataaacgcctaaaaaaggcaattagtgccaatctctctatgcaggatgctgtaaaccaacaacaaggaaaaacagttgcgggtggagcctctacctattacaactcagcccttacttattctctgggttatcctcaaaaagaactaagtttcaacggttccttaaacaatacctatggacaaacagacggtggaacgaattttattatcggaccaacagtcggagccaccaaattattttttgataaaaaactgaatgcgaccgcctcgaccagttacaatactagttataacaatggtcagaagcaaaacgacatcttcaacttcagattgaacggatcttacatttatcttgaaaaacacaatttcaacatgagtgtcatcacactatttaataaaacagccaccagtaaaaacaatgacttaaccgctacattgtcttatacctattctttcgacaaaatcaaaatgcgtccgaaaagagaaccaaaaaccgacgaggatatgaatcttacttctattctaaaaataaatcttaacggaaaaattttagaaggaacacgtgatcagattactgctcaattaaaagagatgcaattggcactaaacccattaccggaaaaagagagcacaaatttagaacatttactcactctggcttcccttacaccggatgacaaacagttcaaagaaaaagtactagactatctcgaagcttacaacatcgaagcagaaaacgtaaaaaaattcaacgaataccttcttgaagccgccaaaaaattggaggcggaaatgaaaaacaaagattcaaatctggaaagtgcttatgttacggccttaggaaaggtaaacagccacaaactgcatggtgtgagtgaagaaaataacactgataaagcagctttcaaatcctatcagaaattaatagaaagaagcaataaaaatcgcgatcagcttacacgtcaccgatggatgctcaaagaaatttcggtattgactaaactgccggctgccgaaatacagcaaaatcccgctgcagtagtttttagcgcagaacaaattgaagaagcttttaaatcgataaaagacaaaaaaaccggtcctgaaataatagccgctatcgaaatcaaaatgataccgttttatcatgatctggctctcaaaaatgcaaacattgatgaaatcgatcttaatcatattcaaaaataataaggagtcaatacctacttactaacctgacaaaaaatggataaaattcaattacccaaaatgctgaaaaacttacacctgtacctgctgttgctctgctccctaataggatttgagggctttgcacaaactttcccaatttcggttacgacccaaattacgcagccatcccctatttacctgagcaaatacgctgatgcgactactataaacagtcccattaaaattcagttgctgctcaacgatttgaccatttccaatcgtcaggttcgattaaaaatatactttcagggtaacggagtttcgttcagcaacaacgattttgttgtaggagcaaaaccactgtacctcgaaggaggatttccattgcaattaactaatgttgatctggctccttactttcaataccaaaaccttctaggattaaatccaaatcaatatgcacagcctttacccgaaggaatcagtaacttttatgtggaggtatatgattttgctacaggaaaaaaactgtccagaaaaacaggtacaactacggttatttttcaaaacgaaccacccttcctaaacctgcctttacacaatgcttcgatcatgcagcagaacctgcagaacattgttttcagctggacaccgcgaagcatcaacgtaagtaatgtggaatacgaattttcattggtcgagatttgggacaattacactccggtgcaaaatgcctttgcttactcgcctccgttgtatactaccacaaccaaaatgactacgctgcaatacggcatgagtgaacctcaactgattcccggcaaaaaatacgcctggcgcatcaaagcaaaagccattcagggagccgaagaaattggtgtatttaaaaacaacggttataccgaaatctttgcttttacttacgaaatattctgtacctctccccttgccattaaaaccgaaagcatcggtcaggatcaggccaggatcaactggagcggaaacatcgacaactttgactatcaggtaaactatcgtgagaaaaattcgggttcggaatggtacaaagccgtaactccgcgagaaaatattacgcttagtaatttaaaacctaacaccgtatacgaatataccgtaggatcgtcctgtgatgtcggcaaatatattcacagttcaatatatgaattcaccaccattgcgagagacgagattgtatttcaaggctgtggtatcaagccggatccgagagatcttgctaaccaaaccccacttcccgaacttttctcgaatgatgtcgttacagcgggagattttcctattgtagttttaaaagcaaccggaagtaatggtaatttctcaggagaaggttatgtaacccttcctttcctggagaaattcagaaaacttattgatgctgctgatgccttaggtgcaaaagatgaaaatggagtttcaaaaggaaaccttagcgaaaatacccgaatcagaattacattcaataatattggtcttaatagcgattttaaactaatttcaggagaaattattgcggcatatgatcctacctggagcggtatctctgatttagatggtgtcatcaatgacgcttttggtgacgccggaaatgtggtcaatcaggacatccagtttcctataaaatccgtagtaaaaaatcctgatggaagcattacgataacaggtccggatgatgttaaagttaacttgccaaaaacggtaaacgacattataataacggataaaaacggtaaacaatatgccgttcctgctaatgctcctgccggaaatatcgaaaaaacaggacaactcgcaccgggaggaattccaaattccaagaatacaaacggaatgggatctggtggaagtatcacagaaatttcttctccagacgtaaatgtaattttctctaaaggcaatggattttatgcttttgataatgctccaacagcagcaaacggaagcttggataaaacttacgaaacaatccctctaaaaagtggcggcacgtacaatgtaaatttgaaagccatttcagacagtcccgctaaaacggatattgtaatcgcaactgccaacttcaaaaacggaaaaaccaaaaaagacattgtttttaaaactcaaaatggtaccgctattgacagtactcaaattgtttggaacaataatgtcgcaacactaaccctgaaaagaactttagattttgctaaagaaacggttattgcaacggttaaggctgctgcatcaaaagatccaaaagaaactgtcgggaaatacgatattgccggagcgattgatttatggcatctgaccaataaaaaagtaaatgtaacactggttagcgttaataatgcgccattaccaagcaatgtaatcgggcagttaaatgcaatttatgaaccagccggaataacatttgaccttaataccataaatgtaaccttagacaatacctggggcgagagcattgaaaccagcgacagtgacttactaaacacctatacaccggaccaacagcaaatcaccaataatctaaaagcaaaattaggttccgattataaaaaagacacctattacgtaatttataccggagctccttccgataaatcaaaccttctgggctttatgccgctgaagcgacaatatggttttattttcaacaaaaccaataccgttcgtacattagcgcacgaattaggtcatggtgtctttggattgaagcatccatttacagagtataacacttctacaaccacagatcttttaatggattatggtactggagtacttttaagccataacgactggcaggtacttcacgctcccggattacaattgtatccgtttattcagggggatagtgatggggaatatagaataaatgagttaatttctggaataaccttagatgatttaagctcattcaatgagaacgaagtaccatttttaactaaaaccggtgaagttctaaaacttaaaaaagaagattttagagacatttcttttaatcaaaatgggacaatttttgcatttactaaaattgaattattaaaaggcgaaagatacttatcggctgtgcaaaaaaaggattcaaaaatcttttctggtttttcatctgatgtggaaaaagatgatactttctttaaattttcttacaactctaaaaactttgattatgtatacatgctttaattgttgcgtaatcgataattttttatgatttttgagtactattaattccaaaaatgatggaacgtattatgagagaaaatgacatgttagaaaaagaagagattttttctaaagtattacgagcaggaagaagaacttatttctttgatgtgagagctactaaagctgatgattattatatcacaattaccgaaagtaaaaaatttaccgaggaggatggttcttttcattttaaaaaacacaagatctacttgtacaaagaggactttagtgcttttgccgaaatacttgaagaaatgacttcctatgtcctgaaccacaagggcgaagaagtaatctctgaaaggcatcaaaaagatttcaaaaaagaatatggttctgataaacctgaaggacaaagaactagtttcactgatatagattttgacgatatttagtcgacggaagactttttttaaagtataagtccatagtgttttgcattttggactttttttaaatacataaactctaccaatttggtagatatttatttacgctttaaaataagcaattcaactatcctgataaaaaagcaacaatggaaatacagctattaattctgccaggtcttggaaattcgggagacaaacactggcaaacgttttggcatgagaaatttaaaaactcaacccgcatcgttcacgacgaatgggatgagcctattcgcgcagaatggcttgagcgtttagaagaagaaatctccagacttaatggtccgacaatactggtagcacacagcttagctgtttcacttgtcctacattggacacagagccataacaatccaaacatagtgggtgccttactagttgcacctgccgatgtagattcacctgcacatacaccggaatctatacgaaacttttcaccaatgccaacctcaaaactgccttttccttctattgtcgtagcgagcgaaaatgatccttacgcgacttttgagcgaaaaaaacactttgccgaaatgtggggaagcgatcttgtcaatgtgggacaaagaggacacatcaactccgattcggatttaaaatattgggaagaaggacaattaattctggagcaattgatagagaaaataaaatagtcttcagtcgcagcctgcatactgtaaactgcatactgtaaactgtgactgaagactgcgactgaagactgcgactgtaaactgtgactgtaaactgtgactgtaaactgtgactgaagactgtgactgaagactctaaactaacctatacgcagtccgttttctattttaaaatcgggagccagcaaaataacatctccctccttgcctattgcgccaagaaccaaacattcgctcataaatttcccgatttgctttttgggaaaattgactactgagataatttgtcggtttaacaaatcttcttttttataatgtgccgttatttgggctgatgatttacggattcctatttcggaaccaaaatcaatggtaagctggtaggctggttttctggcttcgggaaaatcatttacttctataattgttccgacacgcatatcagttctttcaaattcactccaggttaaatccatttttgttttactatttgatattttacaaacctattaattttagtattacaaccgccaattccataactgtttttttgagttgttttccttaatttagaaatcatattgttgttctgatctcaaaaaagaaaatatactccaaaaattaaaaacaagtctatatcctttcttttacagaaatttaaagttatttttgaagaacttatttccacaaaatggcacgaactccttctaatatgattcctcttggaacaattgctccagatttcaaattaagagataccaattcgaataatgactattcatttgacgatttgagaggctcaaagggtactttgattatgtttatttgtaaccattgcccatttgtacttcatgtcatcaaagaggttgttatgattgctaatgattatcgtgtacaaggaattggtgtaattgccatttcaagcaacgatattgagaaatatccgcaagacggtcctgagttaatgactgactttgcttttcagaacaaaatcgattttccctatttgtacgacgaaagccaggaagtagccaaagcctacgaagcggcttgtactcccgatttttatttatttgacaatcaggaccgattgttttaccgtggccagttggacgattcaagaccgggaaacggaattccgttaagcggaagtgatcttcgcagtgcaattgacgctcttatttacaatagaagtttgaaagatccacaaaaaccaagtattggctgcaacatcaaatggaaaacaacgctttagtgttttcaaaaagtttgcgtatctttacaaatccaattaattatttccacagtgactactataaatctatttacagtttctccggtatcgctttctcgcacgagaagagcgtactcgactgtatttatttcacatagtaaggcctttatcaattagacctccgtctatttcaattttttctctcagacggaggattattttttaattttcagtttacaattttcagttttcagcggcagtctccatttacagaccgctagcaatgactgtagctctaatttgcatctgaaaattctacacagtcaacccacaataaattagaatagatatgaaaccaacacctacattctgtaagtcagattatcaatttttaagagaattgatactaaaaagtaaaaacgcaaccaatgccaaagaaatcgggcagctttcacacgaattggaccgcgctatcatccgtaaagaaagtgaattagacagcagtactatacgcatcaattcacatgttattattgaagatgtaaaagcaaaaaaacaaatgaaaattcaaattgtcctgccttcatttgcggacgtaaaagagggtaaaatatcaatattagcgccactaagtgttgctattattggctttaaaaaagacgacgttgtcgattgggaattaccggccggtataaaaactttaaaaatagcagcggtcgacaattcttctgaaaacgcttcttaattttctaaacacctcccgcgtgaaggtgtttttttatgctccctttggagcaaaaaaaaaactatccaaataatatgaatagtttttatgcttttcaaatatcaactccttacaattgagaagttatataattggatattaaagcgatctgagtatcgtctaccttcgcttttttctgcattcttaccagaattggtttccagtcttcctgactaaatttcttcggatcgtatagtttgtgacatcttgcacaactgttttcgtacaagtttttaccttctgccaatgcaggagttagttctgtagtttttgccgtctcagttgcagccggagtggctgttgcaaccggagccgctttttttgtaccgcacgaaacgataagcaacgtcacagcggttaaagttaagatccttaatttcattgttcttgttttttaaagtaaatataaaaaaaatcccattcggctagcgaatgggattgctatttaaaacaatactaaattgctgtaaagtcttattttacgtccattaattcaacgtcaaaaatcaaagttgcgtgtggtggaataactcctcctgcacctgaagctccataagctaaatcagatggaattacaaagcgagctttgtcccctacttgtaataaagcaataccttcgtcccatccttcaataacctgaccctgacctaatctaaattcgatcggttttttacgtgggtaagaggaatcaaatacttttccgttttctaaagaaccttcgtaatgtactgcaacagttttacctgcttccgcttttttaccttctcctttttgaatcattttataacgtaatccactgtcagttttatcaaaacctgcagccaattgctccatctttgcttctgattccgcttttaaagcagcatcacgcttcaaacgagctccttttaaagcgataaaagcttcgattgcattccatttttgagcttcctcacctactctgatgatttctactgcatcaagattatctccctgagctacagcgtcaacaacatcctgtccttcgattacatgaccaaaaacggtatgttttccgtctaaccatgaagttggaacgtgagtaatgtaaaattgagaaccgttacttgccggacctgaatttgccattgctaaaactcccggacgatcgtgtttcaagcttgggtgaaactcatcatcaaatttgtatccaggatctccggttccagttccttttggacatcctccctgaatcataaaatcaggaattactctgtgaaaagtcaatccgtcatagaatttttgtccttgaggttttactttattttccatatttccttctgcaagagctacaaaattccctacggtcccaggtgttaaatcgtgtgcaagttttactaaaatcgaacctttactagtgttgaatttagcgtatattccgttttccatcgttattattttttatttgattgcaaatttacaaattaattttatatcaatttatgctttctgttttttagacccgaagcttcgggatgatttataagtaagaccataaaccgtaaatgccagtgccgataatccaacacatccaatggttacggcatgccatccgcccagtttccacaacaacaatccgtaagccgatccggctgctgttcctaaaaagctaaacgacataaagacggtattcaatcggtttctggcttccggaagtaaggaatacacgcgggtttggtttgaaatatgcactccctgaattccgatatcaataaatacaattccaatcgcaattccgatcacactttctattgaaaaataaaaaaccagaaaactaattaagatcaataaacaaccgtaacctaccgcaattcttgagtttcctttgtctcccatttttcctactaacggcgctgccaaagctcctgaagctcccacaattccaaatagtccaattgtagcactgttaaaaccaaatggttctcccgaaagcagtaaaaccatagtggtccaaaaagctccaaattgtgcaaaactaaacacatttatcagtgtcgcttcacgcagaaccggctgtgtttttataagtgtaaaaagggattgaattaactgtccgtaagttccctgaaattgaggtttattcaccgggaatttattctgaatcacaaaaaagatcagtaaacaaattccggcagcaatataaaacatagatctccaacccagcaactgaccgataaacccgcttaaagttctggaaagcaatatccccacaagcaaaccgctcatgatggttccaactacttttccacgttgttcaggcgcacttaaagatgctgccaatggtaaaattaactgtggtacgattgaagtaattccgattaataacgaagctacctgcaaaaggaaaaaactttttgccgttgccgcaataatcaaagcaattacagaagcaaaagtggtgaataaaatttgctttttacgttcgattttatctcccagcggaaccatgaaaaacagccctatagcataacccgcctgggttaaataggttattgttcccgcactggcttcaggaattttaaattcgttggcaattaaaacaattaaaggctgacagtaatacagatttgcaactataagtccggtgcaagctgccataaataagacattcgttttggataaattcattttgcaaaaataccaatctaattattaccaaaactttaaaaaaattataatttttaaaggtttcaaagccaattcggttcctattttatagcttttaatggactttaagctcttacgattgtataaaatcttctcgcattggactaaaaacatctgtcagaagtccgctttccagacaaactactccatgaatggcatgaggtggaatgtaaaaactgtctccttcttttagagtttgggttacaccattaatagtaacatcaaatttaccactggaaacataggtaacctgagaatgatagtgctcgtgtaaaactccgattccgcctttctcaaaatgtacatttaccaacatcactctttcatcgaaagccagaattttacgtttgattccttctcctacgatctcccactcaatttcatctccttttataaactctttacttgttttaaaatgctgcattttctccgtgtttaattatcttttcgtttcttgcaaattccattaatcggttaacgtcttttcgttccggctatttgtatcaaatttaagctaatctgttttcttattgattacttctaaattaattctttaaaaataaacttttcatcataatcaacttctgacttttgcaaaaagtgaatatactcgtctctgaatgttttctttttgtggtgtgcttcctggttttcaatatacctgattacagtacttagttgagatttactgtatgaaaacgctccataaccttcctgccattgaaaatgacttttagacaatttattactattgatccattttgaggaatcctgtttaatatttttcatcaaatcagaaattgattgcgcaggtctgatcccgatcaaaatatgaatatgatccgatacaccatttatcgccagaagcttatgatcatgcttttttataattccggttatatattgatataattcggctttccattctttgtctatcaacgaacgtctgaatttcactgcgaaaacaaaatgtatgtgtatttgggtgtatgtgtttgccaattctaccgatatttaattcctgacggaataatttgcgatgtgcaaaacatattgtttttttttgccctatttaattctaccgatatttaattcctgacggaataatttgcgatctgtaaaacatattgtttttttgccatatttaattctaccgatatttaattcctgacggaataatttgcgatctgtaaaacatattgtttttttttgccatatttaattctaccgatatttaattcctgacggaataatttgcgatgtgtaaaacatattgttttttttgccatatttcattctaccgatatttaattcctgacggaataatttgcgataaaggaaagagatgattttgtaaaactgatctatgagattaacatttgctctgaaagagctttagcaatagcatagtgcgaagcactatgaataatgatggcaattatgggttacgccctgaaagggcaaaagcctgatggcaaagaaaagcatccggcatattttgtatgagattctctaagagttgtgaacggtttttattgagatttatagggaatgaaaattgcttttgccctttcagggcaattctaccctataatctaactcatagtacttcgtactatgctgttgcttttcgggctttcagcccttttccttttagcttttgttagatcaataataaaacccgctatttttttagcgggtttcttattttgtatttctaaagctgtttatttcaatattaactgcataaaaaccaaatcgagccagtgatcaaatttatatcccacctcgcgaagggttccggtggcgacaaatccaaatttttcgtgaaaagcaatactcccggcattatcggcatcaattgccccaatcataacgtgatacccctgttctttagccagacgaataagctctgacagtaactgagatccaatgccttttccgataacagtatccactacatatacagaatgttctacggtatattgatacccgattttctcacggaattgtccgtaactcccaaatcccactacttcgccatccaattcggcaatcactatgggcagatttttagcttttttatcttcaaaccatttcgtttgaacgtcaagagtctgaatttcataactataatttgcggtggtgtgcagaatcgaatggtttacaatatttagaatcttttctaaatcatttgttgttgccggtctaaggtttaggctcatagttttttgggtatatgcgatgttttttgagtgcgactgcttggcaattattttaaagaaacagcctgatgattcctaaaaaatattatttagcgtttagctctttcagtaaagcgtcaacttctttggggttccaattcatttctttggagatttctttagcatccttagcatattgcaaggccagtttcttatcttttattttttggtaaagccttgccaaaagtagatttccatcgtaagaatcattcagttcaatagcatgttttatccatacgattgatttttttaaactctcggtatccgaaatatgctttaaataagtttgtccgatatctttcagagaactggcatcattccagactaacttttgggtgctttcgagtgtaactttcttgtaaaattgccatttttcggttcgttctgccagagttaagtcaaatttaaaaaccagcgaatctactttttgcaagcgtatcgattttgcaatttctctttgtttgtaatagttggtagtgtctaaattatcaacatacggacgaagtgattctgtgattatactttcggtcttacgatcgatacgactttgtgaggccacagcagcaaattccttgttatgacttaatacatactgaaattccctcgatttgatatcggtaaccccattggcaatcactcgccagttggtttcgctaattaattgcgcgtcagattgtgtattgagataaatatgtgttggaattgataagtcagtacggtcttttcctttttttagcgtattcagatagttgaaaaatttgtcgacattagaaggatcagcgagaaactctttttccagatagggcaattgcagtttcggatttaaggcattatttacttccgtcataaaaacctctttttttaattcgccttttaaagcatataaaagggtttcggtggcagggtctataaacaaaaaggaaggtaacgattttgtattgaatttattcttaagtgcagttccttcttctttttcaatatttttccagacacacacataattcttttttagaaaatcgatcacagcagggtcactaaaaacttcttttttcatcagattacaatgcggacaccaatcggcataaagcattagaaaaaccggttttccttgtgctttggcattgttcagagcggtattataaggcatgtcatcaggaataaattgattttgagccgatgtagtctgtagggatataaaaagaaagaatagatataagaaacgcataatcggtttgttttggatagaaacaatcagttttacaaatatattccctttttcgggaaactccttttaatatcttcctatttataagttaaatccaatgcgaagtttgtaactttgtgaggttaaaaaaagagttttataactgtaagtctcttttcaaaaagtaatacaccataagaatgatttaccccaaaatagcgcttgcacaaagcattatcgaaatttgttcaggcaaaggaatcactaatattattatttctccgggatcaagaaatgctcctctaacgatcggatttgctcaaaaccctaattttaactgttatagtattgccgacgaacgctgcgccgccttttttgcattgggaattgcacaacaaaccaaaatgcctaccgcagttgtttgtacttcaggctctgccttgttaaactattatccggctgtagccgaagcattttacagtcagattccacttattgttatttcggcagatcgcccgcaaagtaagattgatattggagacgggcaaaccattcgtcaggagaatgtttttcagaaccattcagtttataatgccaatctgactgaagaagcttcagtagaaaacgatttaaagatcaacgaagccatagaagcagcgatacttcaaaaaggccctgttcatattaatgctccttttgaagagcccttatacgaaaccgtttccgaactttctgtagcaccagcaattacccatttagaggaaattgtcggaacaacaactatagaaaacgaagcagaagttgtttctgtttggaatacttcaaaaagaaaattaattcttattggaggaataaatgaagcgaattctgtcgataaagaaattttggaaaacttcgccaaagatccctcaattgtagtactgacagagactacctcaaatttgcatcatccaagttttattaacagtatcgatactttaattacgccatttgatgatgttgattttaaagatcttgagccagaggtgttaatcacttttggaggtatgattgtatccaaacgtattaaagcctttttgcgaaaatacaaacccgaacatcactggcatattgatactttacgtgcttatgatacctttagtgctttaacgaagcattttgtaatggaacctgatgcttttttcaaagtgctgcttccaaagacagaatttgcagcaagtgattatttttctaaaattgatcaaatttacgatttaagaaaaatcagaaaagaagaatatctgcgtaaaattaccttctcagattttaaagtatttgaaaaagtaatcgggtcacttcctaaaaacagtcagttgcaaattagcaatagttcagcaattcgatatgcacagttaattgagattgatccttcaatcgaagtttattgtaaccgcggaaccagtggtattgacggaagtacctcaacagcaattggtgcagcagtaggaaacgataaagaaaccgtttttattaccggagatattagctttctttacgatagcaatgctttgtggaattcgtacatacctaaaaacttcaaaattattctaatcaataatggaggaggaggaatttttaggattcttccaggccatgaagaaaaaccggtttttaatacctatttcgaaacgtcacatcatttgacagccgaacatttggctaaaatgtataagatgccttattttacagccacagatgaagaatctttaacgggaggtattaagtcgctttatgctataaacgacgctccttgtattttggaagtattcacgccaacatctgagaatgatattgttttaaagcagtattttaaagagttggtttaagttgaaaatagggcaatacggaaagttgtggagtagtttgaataatgattgttctcttaattcaaaaaaatatttaaagatgatagggttatttttgtaatacctcaaagttttgtgaatcatcaagaattttctatgaaaaaagatttgtccaaaacttgtaagctacagaattagttattccaaaactattgttctgaaagagctttagccagagcatagtgagaagcactatgaattatgaaggcgatcattttcgccctgaaagggcaaaagcccaaattcaaagaaagacaatctatcgtattccggatggtattctaaaagacaaagggaggtattaaaatgtatgctccgatttgtttgcttttgccctttcagggcgatatttcttgtttaatttatacatagtgcattacactatgcttgtactttcaggctttcagccttataaattacaaaagacgcaaagattatttttattctttgcgtcttttttgttttataatagtaagagaaattaacgaatcggaaccggaaataccggtaaacttgcatgtcctaaagcatcaacactttgtacggcaaaaaagtaattgtctttagaatagggaatttcggccttggtttctttcacaaaaaaagttttctcccaatgagacgatgaagtttctctcattaaaatctggtaaccaaaaggaatttgtccttcaggcgcagtccaggctaaggtagaagaattggaaagttcttttacttcgatccccacgtttaaaggtgcttttggtgaccaggctaaattagccagtgttgccaggttcgaacaagtattttttctcaaatagtcaaaatccatgaattccggaagatcaccgtattggataccattttcagttcttaaatcctgatgctgatgattgaaattttcattcatttcgcagaaacgaacagcagtaaagccgttttgactgaaaggagtatgatctccgccacgaagaaaacgatcgtttctatatactaatttcacttttaattgatctacatactgctctgtagctgttttaatgtaacgtgccaataatcgtgacggactatcgttatcgcggtttgttgctttgcgcatcttggcttcttcttcagtttctgtaaatggaatggtctcgctaaatactctgatttgagtgttatctcttaaatttgtaccgcttgagagactatttccaatcatatcgttattgagcatcgctacaatattccagttggctgctttggctaattcagccagatggcgggcaccataaagaccttgttcttcaccagttacagcgacaaaaattatagtggcaggaaatgatcttttactcattactttggccagttcgatgacggccgcaacaccggaaccgtcatcattggcaccgggagcatcagatttgacattcatcacatccgaaaccctggaatccagatgtccgctgatgataagaacacggttatcgtttggattggtaccttttaaagttgccataacgtttccaagctgactgtctttggcaattcgtttcccatcagcttttacgtcaaaataatcgattttagaagtaagtcttccgccagattccaaagcaaatttatcaaactcagatttcacccattgttgcgccgcaccaatgcctttggttttatttttagtgtcgctgagggtgtgtctggtaccgaacgaaactaatttatgaatcgtagcttccagattttcggctttgatttcaccaatcatttttttgatttcaggatcttctgtaatctgtgaagtagaaatatgagtaaaaaataagaaggtaaaaatagaatagaaaatggtctttttcattggttttggattaattataggttctcaaatgtaaccaaaaggaataaattagaataagatgcaactgccttttttttaattagaaacatttttaggattaccattttcaaacttcgtacatttgcagctcgaaacttagctgtttaacagcttagaatttttagcatatgattgaaataggaaaatacaatacccttactatacttcgtgataccaaagttggcttgtttttaggaaatcctgaaaaagaccctgaaggaattcacgatattttattacccaacaaatacgttccgaacgagtttgaaattggtgaagaattaatcgtttttgtttatttggaccacgaacagcgtccggtggcgaccactttagagccttacatcctgttgaatgaatttgcgctgttaagagtaaattacattaataacgtaggtgctttcatggattggggaatggaaaaggatattcttgttccgttcaaagaacaggcccgtcctatggagaagggaaaacgttacttggtgtatttgtacatggatgaaaaaacaaatcgtctggtagcttcaagtaaaaccaatcagtttttgagcaatgagcatctgaccgttgaaaaaggggaggaagtagaattaattgtgtctcatatcaccgaaataggaatcaatgtgatcattaacgagaaacacaaaggattgctgtacaaagacgaggtgtatgatgacgccatcagaaccggggacagaatgcgcggttacattaaaaatatccgtcctgataataaaatcgacgttgcattacaagtgcaaggatatcaaagtattgaacctaatgcagaaaagattttggacgaattaagagccaatcgaggttttttacgtttaaatgataattcgcatccggaagatatcaaaacggtactgaaaatgagtaaaaaaacgtttaaaaaggctgttggagctttgtataaagaaaaacttatcgaaattaaagaagacgggatttatctggtaaaagagtaaaaattccgattcattaaattctaaaatccaaatttcaatactagtattgaaatttggatttttttttaagttttactttctggaaaaagcagacagagtagagtatgaagaaaaaatagttttcatcataagagacaatttatgcaaagattcaatagaagaatgtcgaaggacgattaaaaaatgaattatttgtgctgtatgtttatgataatttctttaacaatattttaatagtatttttaccttataactaacaaaataaattatcatgaaaaatttttttttaatctttatgattgtttttacagcgcaggtttcgcttgctcaggtaaaaagcattaaaggtgtgattacagattctgacggaatgccattgccgggagtttctgttgcagttcagggaggtccaaaaggagctactagcgattttgacggattgtattcaattgaagtgcgaataggagagactttagtttttacatatgttggtcttgaaacaaaaaaaattgttgtaggtgatgaagctacaatcaatgtaaaaatggtacaggcagcttctaatgctttaaatgaagtagttgtcacttcattaggtcttaagaaaaccagaaaatctttgacttatgctgctcaggaacttaaaggagaagagttaacacgtgtaaaagatgccaaccttattaacactgttgcgggtaaaattgccggtgttgctattacaaaaagttcttcaggatctggaggatctacaaaggtagttattcgtggaaattcttcttttacaaataaccagccattatatgtaatagacggtattcctttgcttaatgcaggtatgacacaaccaaacggtacatttggggatttagcaggaggtaaccgtgatggcggagatgttgtttcattaattaatccggacgattatgaaggaatgacagttcttaaaggtgctgcggcatctgtactatatggttctcagggagccagaggtgtaattttgctttcttctaagagaggaaaaactggaagtgagacttttaatgtaaattcagttacaacaattgatgcggcggcttatttgcctaaattccaatcagattatacttcagcccccggcgatttaagaacttggggagccaaacaaaaagtagaaagtaatattaaaggtttttttgaaaccggagttacaaaaattacttctatggctttttcaaaagcgactgatggtgcagcgctatctttaacttatgcgaatacagatgcttcaggcattattccggggaatcatttgaaaaagaataactttggtattcgtcaagcagggaaattctttaaagacaaattaaatgttgctgttactggtaactatgttaatcagataattaataacagaccggtaaacggattatattttaacccagttagcggtgtttattctcatccaagagcatttagtctgaatgacttgaaaaactatgaggtttatgatcagtcaaaaaactggatggctcaaaattatcctggttttgaaacagcccagattaatgaaagtaacgaaaacccatactggcagattaacaaacaaaaatcttttgatacgaatagtttcttcaatggtgctatcgcttttgattacaaaataaatagctggctgaacttaacatcaagatatagctataacagaaatgaaagcaattttcgaaaagaaatgtatgctacttcagcttcttcactggtacatccaaaaggaagatatatcaactctactttaattacaactcaaaattatgctgattttatagctttaattcatactaaattatccgaagatttctcattaaacggaacgctgggaaccagtatcaataatgggaaaagtgcaggtatagttcttgactcaggaattggaggaggattggcgaatgcaaatatctttacattaggaaattttgttaacaataatggtaatgtagagaccacttatcaaagagaagtacaatccatatttgcagctgctacacttggttacaaagattatttatttttagaccttgccggaagaaaggactggtcatctactttagtaaatacagatgatgcaggatatttttatccatcattaggattaacaggtatcttaagcgaaatgactgcaatgccggactttgttaacttcggaaaagttcgcgctacctatgcacaggtaggtaatgatattgctgcttttgttactagcccaacttattctattgtagccggtactcctattaatcctcctgcaggaccaagaccgggcactacattaaaaccggaattaaaatcagaggttgaggtaggtacggaatggagaatgttcaataacagatttggttttgagctgtcctattataattcaaaaactaaaaaccaatatatgttagttcctgcagaatcaacaaatataaatggttatacaaactatgctatcaatgcaggaagtatttcaaacaaaggttttgaggcagttgtatttgctgatatcatcagaggtgaaaaattcaattgggaatcaagagttaacttctcacaaaatagaagcatggtaaatgatattccggctcaaaatgaagaaggaagaattgttttaactgatccgggatctaacagttatcgatattcattagtcgaaggaaggccatttggagtgatagaaggttatagatttaagagagatgcccagggaagaatattagtaaacaaggacaacacaatccaaaggactgattgggaggaacttggtaatgcaaatcctgattttatgctaggatggtctaatacatttaaaataggagcatttactgcaagcattttaattgatgcgcgttttgggggtgaggttttaagtttgacccaggctataaatgatcaaaatggagtttctaaagcttccggagacgcaagaaatgcaggaggagttcaaattaacggagtcagagccagtgacggaaccacaccggttactacaatggacgcaaaagaatactacaatacagttggaggaagaaatggagttagcggagagtatatttatgatgctacaaatgtgaatgttagagaggtttctattggatatacatttaagaaagataaactaccattcgtacagactgcaagtatctctctaattgcaagaaatctattctttatttacaaagatgctccttttgatccaaatgtggctctaagtaccggagaaggtttacaaggtgttgatgtttttggaatgccatcaacaagaagcgtcggtctaaatttaaacttaactttctaatcttactatcatgatactaaataaaattaaaaaaacagcgctttgcttttctttactggcagctgtaagctgtacagataattttgaggagattaacacaaatcccaaagaagcaacaacacaacaactagatcaggattataacagtattaaaagtttatttaaacctgctttcaacagaatgtacatttgtgacgttacctggcaatatcaattgcagcaaagtctgcaagctgatggttggtccggttatatgacaacaccggttgcttttggagcatttaacaatcatgattatgcgttaaatgttggatggaatagttttgcatgggatgatgcgtatgtaaacatcattgcctatttatataaagtagaacaaagatctaaaggaaaatttgatcagttttatgcctggtcattaatatttaaggcagctacaatgcagagaataaccgatatgtacgggccggcagtatattctaaatttggcgctgatgccgtaacatacgattcacaggaagagatttataagcagatgttcaaagatttagattttgcagttgcagaattatctaaaaggattacagcaaaagagaaaacatcttttgctgaaacagatttatcaacctatgaaggtgattatacaaaatgggtgaaatatgccaattcacttcgtttgagaatggcaatgcgtatttctaaagtaaaccctgtattagcaaaagcagaagcagaaaaagcagtaaatgaccctatcggagtttttactaccgttgccgatcttatgaaagttaaatctccggtaaatttaaatgtaatagatgtaatgagccacgcctgggcaggactttttatgggtgctgatatggagtcaattttaggaggttatgaggatcctcgtattgctaaatactgggaaacttctgatgttacttcggggcaatataaaggcgttagaacaggtatcgtttatccttcaggaacaacttatggtaaattctctaaaactgctgcaagaacaaaaaacggtgaaattacctggatgtcgactgctgaagtatacttcctgagagctgaaggagctttaagaggatggaacatgggcgggtcagccaaagatctttatgaggcaggtattaaagcatcatttgatcagaatggtgttgaaggtgcagccgcttatactgccaataatgttaaaaaacctaaagattatgtagacccgattaatgctgccaataatgctgtggcagtctctaaagttactgtagcatggggagcaactaaagaggaaaatcttgaaaaaattatcactcaaaagtggattgcaacttaccctgatggacaagaagcctggtcagaatttagaagaacaggttatccaaaattgttcagaattaccaataacaaaagtggtggtgtaatcagtactgaattaggggttagaagattggggtactctcaatctgagattaacaataataaagccggagttgaatccggaattgccaaattaggaggacctgataatggagctaccagactttggtgggatgttaacaaagcaaacttctaatatacaaacagaattaaaagaatttaagtttggttagtaaatggcgtagacaacgcgagttgtttatgccattttataaaccaaaaatgtaaatgttataaaaagaaaagaaatgaaaagtgctttagaaataatacctgatatcagctataaaagcgcggggaaatttgaagagacacgatttgagaaaatccacaatgaaatcttcaggaattccgcagaagcttcggtaattgtagcacaggaaattgcgcaattaatccgatctaaacaagaaaagaataaatcttgtgtattaggtttagccacaggttcttctcctatcaaagtttatgaagagttggtgagaatgcacagagaagaaggcttaagttttagcaatgtgatcactttcaatctggatgaatattatccgatgagcaaagagaacaatcagagctatcattatttcatgcaccaacatctttttaatcatattgatatcaaacccgagaatgtaaatattcccgacggaaccgttgccattgaagaattgaatcaatgctgcatcgattatgaaatgaatattaaaaatgccgggggactggattttcaattactgggaattggtcgtacgggtcacgtaggtttcaacgaacctggatcccacatcaactccggaaccagaatcattacactggatcacattaccagagtcgacgcttcgtcagattttaacgggatcgacaacgttcctaaaagagcgattaccatgggagtttctactatcatgagatcgaaaagaattgtactaatggcctggggacagaacaaagccgatatcatcaagagaactattcagggcgatatcagttcagaagttccggctacatttttacaaaaccatcctaatgcgactttcgtattagaccagtcagcagcttcagaattaacccgtttcaaaacgccttggttagtaggagaatgcatctggacacaagaattaaaaagcaaagcgattgtttggttgtgccaaaaaacaaaacaatctattttaaaattaacagaccgtgattacaacaacaacggaatgtcagatcttttggcgcaggaaggttctgcttacgatttgaacatcaatatgttcaatgttctgcagcataccatcgccggatggccgggtggaaaacctaataccgacgattcacatcgtcctgaaagagccaatccggcaaaaaaacgagtgattctttttagtccgcatccggatgatgatgtgatttctatgggaggaactttttcaaaactgatcaaacaaggtcatgatgtacatgtggtatatcaaacctccggaaatatagccgttacagacgacgaggcacttaaatttgccgaagtggctaaggattttcttggtgatgctgccttgggaatcaactttaaagctgtcattgaatttttgaatagtaagtctgaaaaccaaattgattctttggaagtccgcaaattaaaaggattgatccgaagaagagaatcttatgcagcgacccgatacatcggtttaaaagatgagaacacccactttttagatcttccgttttatgaaaccggacaggtaaaaaagaatccattggggcctgaagacattgctattgtaaaggacattattgcacaaattaaaccccatcaggtatttgccgcaggagatttagcagatccgcacggtacacatgaagtttgtctgaatgccatctttgcagcaatgaaacaactgaaaccggaaaaatacatggacgactgctggttgtggctgtatcgcggtgcctggcatgaatgggacattcacgaaattgatatggccgttcccctttctccatcagaagtattattaaaacgccatgcgattttgtaccatcagtcacaaaaagaccgcgtaatgttccaaggaaatgattccagagaattttgggttagagccgaagaccgtaacaaaaatactgctgttttgtatgacgaattaggactggcagagtatgaagccattgaagcttttaaacgttttgattattaaaattacattataagatccgggtgagagtggatcgaaacacaaaattcagattgattttattaagaatagtgaggattcgacagaagccactctgatttttgtttcttttatttaatagtacttagaggttttgttacttatgaaatgcattatatattatgtaggagaaaaaaaaatgctgtgttttggaaaaagaatattcgcgtagagtatatcagcggtattacagaacagaatattgataatgttttgggagatcgtattttgcttaaaatagaagaacgtttagaaagaaaaaagaaaacctattattatagaatttcggcatctgttgcggctgttatacttttaggaacgttgctgtttacttttaattctatttttaaaacgaatcattttattactgttgctgcacaatttggtgagcaaaaaaatgtacgattacctgattcctccgtggtttatttaaactcaggaagcagtatagtttatccggaacactttggagaagattccagagaaattactttaaaaggagaagcttattttgaagttgtacacaaagaaaaacatccatttataatttcttcagctcattttaaaacgcaggttctgggaaccagatttattgtaaccaattatgaaaaaggtcttgcgtcagtaacggttgtttccggaaaggtaaaagttacagatcagcattcatctaaatccgaaattatcactaaaaatcagagagtgagttatgatgatgtttcaggggcttttataagatctaataatatcgaatcatcaaattacctggcatggagagagggaagaatcttttttgatcacgctcagatagatcaggtattgctaacactacagagaaaatacaatgtggtactgaaactggattcaaaaccttatcaatgcaatactattagtggaaatttctcaggcaatgacatcgaaaaaatcttaagcagtattcgtttcattaatgatatggaatatagcacaattaaaaatgacaccataaaaattaaactaaaaccctgtaaaaactagcgcctatgcaaaactgaaaaactactcaaaaaatataaaaaaacccgaacatggcggccaccaatcatcgggtcacattaattgcaaataattaacataaaacaaatatattcaaattatgtatcttgtaacaaataaaaacaataataaaaagaatatacttttcttttttttggttacgttatggacacaagtgacatttgcgtcagcatttacctcgcaaagcacagaatctactccagtatcagtttcaaaaaatgtttatgaactcaaagctttatttaaagctattgaaagtcaaactgatttttcgcttctttattctgatgaggttgcaaaacttaaaactcaagttccttttagttcaggaacacaaacaatagcagcattacttaaggaagctgctgttaaatttaaagttgcttatcaaataaatgatggtttgattacttttaaaatgaataatcctgctaaaggtaaaaaggcagtaaatgtcgcaaagcaaataaaaatctcaggtacagttacggataatttaggtaaaccaattcccggagctacaattctgattgaaggaacatcagtaggggtgcaaacggatttagacggaaaatacagtattgaggccggagaaggagaaatactagtttttgtttatatgggatttaagaccgttaaacaaaaagttgaaaaagataggacaatcaatattacccttgaagaggaagctgaagcactaaacgagttagtaattactgccttaggaattaaacgagaagaaaaggctcttggatatgctgtacaaaaagtcgatggctcttcagtacaaacggtaaaaggtgtagatgttgcaacgtcattaactggtaaagtatcaggtttacttgtaaaaaacagtactgaatttgcagaatcccctactgttgaaattcgaggcgaaagtgccttattagttattgatggagtaccttatggaaacatgactctcagggacattcctgctgatgatatagaatctttaagcgtactcaaaggagcaactgcatcagccttatatggctatcgtggcgccagcggtgctattgttgtaacaaccaaaaaaggaagttctaaaaaaggccttacggtatcgttaaacagcagtacgatgtttacagcgggttatctggcaattcccgaaacccaaacgacttttggaagacagatagatgctactaccaatatgtataagggaacaggctcttggggagtaccaatggaaggacaagaagttgttcagtgggatccggttagtaaatcgtataaatcgatgccttatttaccagtaggaaaggataattttaaaaactttctggatcagggttacattttaaataataacttaagtgtaacacagcaaggagaattcgggaatcttagatcatctgcaacctgggttagcaataaagggcaatatccaaattctcaatatgataaatatacttatacattaggtggagatattagtatagataaattcaaattatcatcttcaatatcgataaataagcaaagttcgccaaatattggatttaatggttataaaggctatgatccaatgtataatattctggtttggtcatctccggattacgacatacgaaaatataaagattactggcttgtaaaaaatgagtcgcaaaataacagttataccggtacaaataataatccttattttgacagatttgaaagattacacagtttagaccgcaatgtttttaacggttttgtttcggcaagttatgaaatagcgccctggcttaatgctactgtcagaactggttttgatacctataataacaaacagacagttagggtttcaaaagggtctctggttggtgccggtgtctctacagttattcttaacgggactgagatttggggtgaatctctaaaaggatcttataatgaaggcctaggaagtggttatagttctaatactgattttatcttaaatggaaataaaaagatcaatgattttgatattgacggtctttttggaggaactatttattatacacaggacgaaggtattgaggccagaagccagggaggactttctgttcctgggttctattctttaaaggcttctgttactaatgctgttgtgaattcttctgtttataaaagacaggtaaacagtttttatggaagacttgccggatcgtggaagggaatggcttttcttgaaggtactttacgaaaggactggagttcaactcttcctgaatctacacgttcttatctttatccatctgtttcaggcagttttttagtctcagaagttttaccaaaatttgattggttaactttatggaaacttcgcggttcctggacttcatctaaaaccccggcaggagtttacgatattaattcggtttacaatattacaaccaattcctggggaggtttaaactcggcatcttatcctgatgttatccgtggaaacgaagttagacccgagtcagccagtacatgggagatgggaacagctgccaatttgtttaaaaaacgtttgtcatttgattttacttattattcaaagagaatgtacgactttttaaccgctaccaatgtcagcagtgcatcaggttttagctcaaattatatcaatatagatcaggaaattacccgaagaggagttgaacttacactaaactttacaccaataaaaacttcagactggcaatgggatgtaatggcaaactggtctaaatatgcacgctattatactaagctagataaagaattttcggcagacagaccctgggtaaaagttggaaacagagttgatgcttttgttttaaatgattttcagaaaagtgtaaatggtgctgttatttatgaaaatgggctaccggtctattctccttatgagtcagtttatggatatagtgatcctgattggatttgggggctgacatcttcacttcgttataaaaatttcactttgaatatttctgttgatggacgggtaggaggtttggcacaaactacaaccgaaatgtatatgtggcagtcaggaaaccatcctgactctgtaaatgatattcgttacaaagatattactaccggtacaagtaattatgtaggagatggagtaaaagtaatttcaggtgtagtaacttataatgcttacggaaatattaccagtgataccagacaatatgcttcaaatgatgttcctgttacttatgagaactatgtaaaaagaattcataaaggtacagcctggggaggtaatccatctcctgcggatacttacagcactacttttttgaaattaagagaagtctcacttacttataatgttcctaagtcagtatatagttttataaaagcaaaaaatgctacagtatcagcaataggtcaaaatttattcctttgggcaaaagattttaaatattctgatccagatggaggagttgataattttagcgatccttcacagcgttttgtaggttgcaatattaagcttgaattctaaatttaaaagtaaaaataatttaaaattattaatatgaaaaaaataatcgttgcaattacaggtatactaatgttttctggctgtagtaattttgatgaaatcaataccaaccctaatacgcctaccggggtaagtgcttcactattagctacaaatataattctgagtattgctaaatatcaaggcactgattcaaaagaatatatttctgaaaatgctttgccaaaatatgttggttatgctaatgaaggacaattaggaactcaatataacttaatagccaattcaagttttaacaaaatgaccattttacctgatattgataaaatgttacttgctgctcaaggcagcccggcagaaaactcatataaaggaataggtcattttataagagcgtatactttttatatccttaccatgaagatgggagatattccatacagtgaagcaaatcttggactgcaaggcaattataaaccaaaatacgacgctcaaaaagaagtttttatggggattcttggtgaattggaacaagcacgtcttgaattctcacaaggtttgacttttgatggagatccaaccatttttaaaggaaatcctcaaagatggagaagagcctgcaatgcatttgaacttaaagttctaatgactctcagtgcaaaagagagtgatgctgatttaaaaattaaagagaaatttgccagtatagttaatgaaaatatacttcttcaagatgattctgattattttggcttagagtataataccgtaaaccttcatccattatacagtacaaatgatatgtttaccggaagaactattttaagtgatattgtagtagacaatctaaaaagactaaacgataaaagattgttttattttgcagaaccctcagcagatcaaattgcaaaaggattagctcaaaacagctttatggcttatactggtgtaaaaacttcattagattatggactaatgaacgctaattatgcaggtggcaaatattctaaaataaacctgcgataccaaaccaaacaaaatagcgatccaagaaggctgcttacctatgcagagcaggaactgattttggccgaagcgagcattaaaggctggattactacatcaaatgcacagctttattatgaaaatggagtgaaagctgccttaaaaaatcttatgagtacagatgcttcttttgcacatggaaatcctattgtgcaaaatgatattgatacttattttatcggtgaagcagcattttcggcagatgctgctacgcaattgaagcaagtttggatgcagcgatatttgctcaattttttagttgatgcagaaactgcgtattttgaatacagaagaaataaatacccggattttaatattgacccgacaacgaacctaaacgttaatagtcctactagtatgcctataagatatttatatccttcttcggaattgaattataacagtcaaaagttgatggaggccttaaaccgtcaatttggaggttatgatgaaattaataagacaatgtggcttttagcaaattagcaaaaaggtcatattgattagttttgtttttttattttttttaacgctgctctttataattagagcagcgtttttattggcaaataatagaaaataagaaatcaattttaaagatttaaaaattaattaattcaatacagaataaaaataaagttatgagaaaagtaaaatttttgatagtgattcttttggccatgcaaatcaatggacagaatttaaaaataatgacttacaatattcgtgtagacctagcagttgatagtgataatgactggagccaccgcaaagatttttttacatcccaaattcagttttatcagcccgatgtatttggaattcaggaagcggcaccaaatcaggtaaatgatattgcaagtaaccttgctcaatacagttttgttggtataggaagagaaggtgttggaaaaggggaatcctctactattttttataatagagagcgtttaaaaatgcttttaaataacacattttggctttcagaaacacccggtgaaatttctttgggttgggatgcggcatataaaagagtctgcacctatgctttgtttaaagatctaaaaacaaagcagcttttctggattttcaatacccatttagatcatgttggtgaacaggcaaaaataaatggtataaaacttattcttgctaaaattaaagaagtgaataataaaaattattcggtcatttttactggagatttaaattcagagcctgaatcagagggcatttttcttcttaagaaagaaatgaaagataccagagaagtttcaaaaacactaccttttggtccttctggaacttttaacggttttaagcataatgaacccgtaacacgattgctggattatatttttatatctaaagatgctggttttaaagtagaaaaatttgctgttttaagtgattcaaaagacttaaaatatccatccgaccatttgcctgtttatgtagaattgagttattgaaggaatatatatcgtcagttctgtatcctcaaagactatggcgatgttatccggtgtctttgcaacctgttcttcaattaaatctacaattgtcttgtccttcggataagctactgttgtatcattaaaagtgaaaagcagtttgtgtttctcttcttccgatatataatctatttgtgctattttctcttcaggtttttccaacagcgcatttaacaactgtttgtaatgtcttatcagtccttcaaccatcaccttctcatacacatccgggttgtatacaaactttaaagacaggtaatcacctatctgttgaatggtaatttctatatctaattttgatgtactaaggcttttatcaacggtctcatttaattcttcatctgataattctaccccttcgattctatcccaactgttttgaatagtaagcatgacatcaaaaactgcacttctgcttatatctctctgaagctctaattcatctaccaatcggtcaaaaggatacattagatgactatagctctttaaggtattctcttttaaagcttggtaaaattcatggaagctttcttcagggttaactttatttcttaaagctaaggtatttacataaaagccaatctggttttccagatctgcatgatctctacccgctaccggacttcctatgatgatgtcctgctgagatgtatagcggtatagtaacaccttccatgaggccagtaagcccataaaaagactgccgccattctcctggatatatcccttcagtttagctgttgttgctttgtccagataagtggctaagccatgaccgttataggtcttaaccttcggccgctgtttgctagccggcagatccagtaggggtaattgtcctgagagtttgtcaagccaatactctcgatgagccttaaacgactcctgattcaattgagataactgccaggctgaataatccttgtactggattcttaattcctccatttcaggttcttttcctgccttgtaggcttcataatatctgaatatatctttggtcaatacctccattgaccagccatcgccaataatatgatgcatgttgtaataaaatatataatcatcttcagctaactgaagtaaagatattctcaataaaggtcctttttctaaattatacgcacggtaagaatcggctacgatataggcttctgctttttctctcctttccgcttcttctctaaagtcctgatagtcgatttcaaagcccaactcttcccttttcagtatccattgtctaatttctcctgactcctcttccctgaagacggttcttaaaatctcatgacgatctattgtagcatttatagctcttttgaagctttcaatttcaatttcttgattcaggtaagtaggctttgatatatgataagctaacgaaccttctttaaattgactcaatacccataacctgtgttggcctgatgataatttaaatggattattgccctcaacaggcttaatgtcctgataatcggtatcggtgccatttgcactaagataagcgatcaactctattttattctttttgatttgctccaataacgcatcagatatcaaatcaccattgtatttgatctttaagcttccttgttcaactaacaaaaaaattccttctttcagtaatttagcgattaatttatccattatatttcaagttcgtgttcaaattgtgtctctgcgctcttgcgtttcattagactaaactccagctttgcatcaattatcctccctaaatcatgtatgtttgtattctcaagcatgtcattaattcttaattcaacatttaattttttatgaattaaattgaccattctcattgcccttaatgagtccatacctaaatcaaaaaaattatctttaattcctatctctttaattccaaagtagctctcaaacagtgcacaaatatgctgttccgtttctgtttcaggtgctttatattcatcagacaaagcaaaccgctcctgaactatctgcacttcctccgtttcaacattcaggtcaacgtccatctttccaatagcctgggtaaggtcccgcgtgaaaatagaaagacttggtattccatatttcagtatgcggcgcaacacttcaagcccttcagcattggtcaatccatgctttaaatttaattcattcccatacttcgctttatgagcgagggaggagactatagccattcctgtttccgaccaggcatcccatccgatactatataccggcagcccgttgctattagagcgtgcaaaactatcttgaaaaatatttgctgtagtataggctacctgaccaaaaggagcagttactgaagatacagaagaacaaatcactaaaaaatcggcagctgctttcctggccatctcatataaaccaatcgttccgtagatttttgaggcaaaaacttcttcactttgttctcttgttcgattttgaatgataccggcataatcccctattcctgccgtgtgaaaaatcccatcaatctttccaaaatgcccctcggcttcacgcaccaacaactccatttgaccaacatctgagacatctgcgttaaggtaaatgactttcccgcctatttcttttagcctggaagtgatagcatctgattcaggtttccttcctgtcaaaataagcttcgcgttatattgcttaagtaaatattcgctaaatacaaaacccattccgcccattccaccggtaattaaatacactcctccatcctttatcagtgctggcagatttttatctgattccaatttgacagaatcatgaaattgtgaccatctcgttgcctgacgatatgcgatgtatggctcagcatattctgtaattatttcattgaacaagtggcacaatatttcttcttgtttatcacttggcttaaaatctattagtctgcataaaattttcttgtactctttaggaatagatagaacagagcctaaaattgctgtacgggcaggaatttcgatatctccatcatttactcttgcagcaaaacttgtaatcatatctatacttacctgatgaaatgggctcacctgttctatagatctgactatgttcaataagctgtaatacccaagatccagatcctctactgtagattgataggtaatttcttcttgttctttagaaaaattccatagatgaacaatcttttcaggaagaagcgaactttctgccagtctttcaatgagtttcagatagttttcttcttttttaaaattcaatttaaaggtataatcctctttttcttcaaaatgagtcccctgaattacgcggacaaccttaacgtttgtattttcttttatccggttaatcaacagttctgccactccctcattatcacaaaatatcaggtatgtagatacatttgcagtctgtccggttattggtaataatctggatcgtttccatgaagattcaaagaaccaatcagaaatattttcatttttttgacctgcacccttcaataacgagccggacaacatttcctcaagagctgttgccattgggtattttgttggctggaagctataggttggcagggaaatttttttcctgattttttcttcctctaaacgagcccagttcaggtttatgcctgattcccatagacctgagagtttttccagcataaataacatatcagctgtttctgtattaggatgcctgatcagctgatgaacttctgataatcctgttgctttaaagtgcaagcgtgccagcgtactaagcgtattacccgggccaacttctatcaaaatcgtatctccttccgataatatacactctatcccagcagaaaattctacggttcctcgcaggtgatctgaccagtaactcttttttaaatcactgatatcaattcttttacctgttacattggagaggtatggaattttaggcgtacccaattttattgaagatgcaatggaagtgaattcctccagaacaggatccatcatcagagaatgtgaagcgtgagagatgtataagatccttgaaagaatcccttccctttcaaagcgctctcgaagtactgctatcattgagggttctccagacactacacaactctcagcagtgttgattgctgctatgtctacgcctggtactaaatatgccttaacctgtgcagcaggcaggcctaccgccaacatatccccttcaggaagattctgcaccagtgctccccgcctaataatcatctttagcgcagattctaaagtgagtactccactaaaacaggctgctacatactcccctaagctatgcccaatcataatatccggcttgatgccataatattccagttgctttgccaatgcatactcaaacataaacaacaaaggctgcatgtttatagtctcattgatcagatcacttgaacctggttgatcggggtagatgatctgcttgaaatctgttgtactttctttcctggcaaggccgaaacagttgtcgagtgtttttctaaatacactgttcttgttttcgtataatccccgtcccatattctcatactgagatcctccgcctgaaaacataaaggcgattttcttcttactaaccggtttcttatttggtacaacggacttactttccagcaactcaattacctcgtttgtgtgcccggcaacaaatgctgaccgatagtcaaaagtatggcgcatctgcaacgtccaggctatatcaacaaaatcgagttcccgatttgcgataaggtatttttttaactgctcttgttgtctcgccagtgcttccgggctattggctgacagcgttattagttcgaaggaaggctcttttaccggacttacttcaagcggtgactcttccaaaataacatgggcattcgttccccctattccaaatgagctgaccccggctctaagcggaaatttttcgttcttccattcttttaattctgaattaacataaaacggactttcttcaaaattgatctctgggttgggagatttaaaatgtaaagaaggaaccaattttttattctttaaacacaaaactgtttttataaaaccagcgacccctgctgctgtatccaaatgccccaggttgctctttacagaacccacggcacaatatttctctttattattgttaaaggcctgcgccaaagcccgaatctctaccggatctcccagtttcgtcgctgtgccatgagcctcaacataagatatactttccggagcaacattagccgatctgtgggccatttgaatcacttctgcctgaccattcacgcttggagctgtataccccacttttctgtttccgtcattatttaccgcactgcctttaatcacagcataaatctgatcgccatctttaatggcatcagctaatcgtttcaataccaccgctcctgctccttctgaaacaactgtaccactagcttctctgtcaaatgtccggttgtgtccgtcttttgaaaagatcatgttttcctgatgcaaataccctgtttcttttatgttattttttatcgatacacctccggcaacggctatatgactttctccggaaagtaaacttagtactgcctgatgtatcgctaccaaagaggtagaacaggcagtatttatgctatgtactggtccgcgcaaatttagtttatgagcaatcagtgtattcgaaaaatctttgtcactcaaattgtttgcctgaaacgggtcaatttttccatcattcttcagcaagctataagcctcccatctcaaattgcttcctgctccagcaaaaagccctatcaaacctttatagctaaaaggatcataacctgaatcctctagcgcagaccataccacttcatgaaaaactctcgtctgtggatccatcaactttgcttcatcggacagataaccaaaaaaaccggaatcaaagcattctttattttctaaaacggaactggctctgatataagcctcgttattaagctgctcgctggaaacaccataagaaagtaattcttccttgctgaaatgagtaatgaactccttaccccttattaaattttcccagaattcaaaaatgtttttggcctgcggaactttaatagacatcccgataacagcaatttcagtctcatattcttctctctggaatactgaagtctgttgagccaactcttccctgtcttcttccgaactatccccagataacacagctgcctgttgacgaatcgtactaaattcaaataatgatgccaatggaaagtcgttgtgaaactctttaccaatttttgattttaatgcaatcaacttaattgaattacctcctgcattaaaaaagccttcatctattccaatattttcctttttcaatacttcttcccatatctttaccagcttctcttctatgttattacctggggccacatattctactccactctttagtcccaggccttcaggattcggtaatgcttttttgtctattttaccattggccgttaatgggatggcctcgagttgaacaaaatgtgccggaatcatatactcaggcaacgactgttttaaataaactcttaaattacttgtgttttgctcaatatcagaaacgatatacgccacgagttctttctctgctgactcgttctctctggctaagactactgcctgacttacagcttcatgttttactaaaacatgctctatctctccaagctctatcctataccctctgagcttgacctggtcgtcttttcggcctatgaactcgatgttgccatcgggcagccaacgacctaaatcacctgttttgtacaaacgctctcctgattcaaatggattcgctataaatttgatttatcctatataagtcttataaaaatgttaacaacatggtaatcttgaaatatttaaacaaaatacaagaacctataaatcaacactataaagtaatttagtagtatagaaaaaccccaaatttttacttaaaactacctacaaaagtaacaccgtaaaaatttaaaaaatgaaaacatcatatccactcagcctaattatagttctaagtttttttgtgtcttcttttgccaaaacggatcataagaacgtttcttataaaaaaacttcaactgtcgcacccgtttacaagaattcaggttctgataatgtaaacgaaatttcaaatgacttctttaaaagatattctgatttgaaaaaatataagtctgatgtcatgtcattatacaaaaacagaaccccgggaactatttggtttgatgaagatgccatcaatgagtttggttctgcattatatcaaaaagctaaaaaaacgaatgatttggttgttccttatcaaaaagaaatcgatgctcttttttcttcttcagcaacaaagttgtctaaaacagatgcagatatgcttttgagttctttatatattgcttacgccaaaaaaagtaatgcagatgccgggaaaaaaatgtcgtatgatgctatgctgacagattttttaaattacagtacaatcgaagaagccactacttcgaccactgaaaatgttaaagtaacctatgatcaatattataaattacaggacgttctgaaaaaatataaaaaactagaccgttctaataaatggaaacctattgttccggaagaaacaccttataaagatttacgtccggatgctgtttcaaatactatcgcccaagtcagaacccgtttatacttattgggagatttaaaaaaggattctaaaagtaacgtttacgaccgtgaattaatggatgctgtaatgaaatataaagttcgtaacggtttcaaacctaactatattttagcagaagagcatattaaagaaatgaatgttcctcttgccgataaaatggagaccctaaaacttaacatggagagatgtcgtactatttcggatcaaatggccggttgcgatgaatatgttttagtcaacgttccttcgtacgaattgatttatgtaaaaaatgggaaggttcaactgtcttcaagtgtctttgttggagcaccattaactaaaacaaccatttttaatggcgaaattgagagaatcgtttttagcccttactggaccgttccgcaaagtattgtaaacaatgagttgaaaagtaaaatcgctgaggataaaaattatttggccaaaaagaatatggaaatagtaaatggtcaggtgagacaaaaaccgggtcctgaaaactcattaggattagtaaaatttatgtttccgaaccctgatgacatctatatgcacgatactccgtctaaaactttattcgattttgaaaaaagaacgttcagccatggttgtataaacgtaaaaatggctaaagaattagctactgccatgcttaaagattatcctgaatggactcccgataaaatagataaagctatggcgggtaaaacagaaaacagttttaaactaactaaaaaagtacctatttatattacttattttacttcgctggtcaatgaaaatggagaaattggtttctttcaggatgtttatgagcgagatgccgaattaaacaaaacggtttctcctcagacgggagtagtatctaactaaaatttaaccaattagttagttcacttcatcaaaagagctgtaatttttaatagggtaattttagatttgaacttagagtttgaaagaataatagtatctttaataactcaaatgcaaatctaaaattacccttttttatggaagacgattatactgaagttagaaaaagctggtgggacagaaactggaaatggtttgttccaaccggatgtttaagcctcgtggtgctgtttggtgtgtttatagccgcacttgtctttggagttaccaccatgctcaaagaatctgattcttataaagctgccatgaacgaagcacagcataatgcaatagtgctggagaaattgggcagtccaatcgaagacaacggagttgcctcaggcagcgttaattcaagcaacagtatagaacattgcaacttacaaattccaataagaggttctaaaagcagaggaactttatacgtcgtgggaaccaaaaatggaacatggaaatacgatgaaatgagtctttatgtcgaagacactaaagaaaaaattgatttgctaaaaaaataaaaaacaaacaaaataccttcacctaaaccccgtttacgatactacattatgaatctacgtccgttttttttgttcctttttctaagtttttattcttgtattttttcccaaacaccccagccaaatacctcacaaaagcaacctgaaagtaagactgctgccaatcaggttgattatgttaagatcctctggttagacaaaaaaggtgttttgcagctcaatgaagattatatcaaaaccttaaccgatccacagcgggcagcgctaggattcatcactacaagcctggatcatgaatgtcattgggatggtgataaaaaagccgatgaaagcaatctgaaatgtaaattcctttgggcactcaatctagggtatcaatgctctgaaacgcatttaggatttttaaaacaatggttcaaagaggatccggacgttttagaagacctgcagacctgtaccaaaaatgaaaccttagccaacaccagagaattttttctatggttaaaaatggccactacaaatgataatattaaaatcatctactcggcagccgctatagacggtggcactaatttcaattggaaatggacggaagcctccagctactcctataccaatacgggaattaaacagatatccaggaaaaatcttgaaggaaggatcttttagaaaaggaacttaggttctgaggggctaagtggtttcaaaaataacttcatcctttttgtggcaattttggaaaaataatattcgaataggctatcttattcagctaatttttactgtcccctatttatatatcgtataattctttcaaattaaattttattcaaaacagaccctatttcatactaattctaatatccaactccttaagtaactgatgcaataccgtttattcagcaaggctttttttttcatttaaaaacatcttctttagtagttagcttcactgtcatattcctatatttgggcaaaaataaacctatgagaaaaattacattattattactgctagccctaatcagtggtacttcttatgctcaaaaagcagacactaacaagaaaaaagttaaaattaccatcccaaaatcagattcctttaaaaacattaaaacatataacatcatcatacagggagatgacacctggaatgcaacgtatgccaagaagaattcaaaaacttatgagcataatgttactaaaaatacaattgaagattacactaaaaaagacacaaccaatcccgacgttcgcgttttaatggggtacaaaggagctacttataaaagagccgataatggtacttaccttttagatggagatttcaaatatttagttttaggaaaaaacaatgaaatcttatatgaaaaaggtacaaatgccagaatgtattctggtacttatgttaacggaaaaccaaatcaaagcttagccagcgatttgaataatataggatataaataccttactgacaataacattcttattactgaaaaagaatttactttaaactacggtttatttgaaaaagcggaggagtttaatgaacttgttgagtttaacactaaaacagatgaatttttaaacaaaattgctgccaattctttagaccaatcctacctttcagaattagaaaaattctatttgagttatgttggtaaagaatacaaaaaattaaagccgaaagattacaacaaagtaatttacctgaacttagccttaacacaaatgtttctgttaaactttgataaatctttagaatatcttgaaacagctaaacaaggtgccggtatgatgagtttatggccaggcgaagctcaagcaaatattacaagtttaatgacggttaatcaaaaaaacttaactgctaaagttgaaaacccaacatttgattcggcttactttatctatatcaatggaagcgtgtctcaaaatgataaaaaactgacaggaaaattaaaaaccgatcgttttgccaatcatgcagaaggaagtatcatggaatctaatgatccaaccgcagcaaaagtttgggcttacaaagataacggagaagttgattttgtagtagttaatgataaaacaacaattactactgataaaggtgttgagttaaaattcatttcgtataataacagctttattctagtggagaaaacaggagatttatgctttaaaaaatacgaatctaactcgaatgatgtttactgtgagaaagacggtaaatttgtaatacaaaaataaaaacacatttagtacctacaaagtacaagaaattaaaagcggttcaatttaaacaattgaaccgcttttgcatttataggatctatttgctcaaaaaggtactaaggttctaaggttctgaggttataaagttctgaaaacaataaaagcttagctcctcagaacctcagcccctcagatcctccaaaaccccattgttaaggttgcaacaaattgtttgttctccggaaataaaattgtggctttatttttgaataagtagtatttttgaaaacttataaaattacactttaatgaaaaagattctacttctgttacttacgcttacgttttctttcacttctaatgctcaggtacaaaaaaccttagatcaattatctcaattgtcatcaaaaataaaaggtaacagcggtgttgatattgcctcgggattaaaggaagccctgaacaaaggaattacacagcaagtaagcaaattaaccgctgaggatggtttttacaaaaatgaagcggtaaaaatcctaatgccggaagaattacaaagggttgacgctactttacgaaaaattggtttatcctctcttgccgatgaaggtataaaagcaatgaatcgtgctgctgaagatgctgttaaagaagctacaccaatctttgtttctgcggttaaaaacatgtcgtttaccgatgcaaaaaacattttattagggaacgaaagtgctgcaaccagttatttacaaaacagtacaacaaccgctttgtacagcaaattcaatccggtaatcaaaacttcttttgaaaaagtaggtgctgatgtaatctggacaaacataatcaaaaaatacaataccattcctttggtaagaaaagtaaacccggatttgactgattatacaacaaatcaggcattagcaggtgtttttaaaatgattgctgtagaagaaaaagacattcgtaccaacatcaatgcaagaacatctcctttgttaaagaaagtttttgctatgcaggacaaaaaatagcttttaatggtttaactgtttaatcgttgatttgtgtaatcgggatttacagttagcaattaaatgattaaccaataacctaaaccaaaatgcaaaaaataaccattctgatgcactgcaaagatcaaaaaggaatcattgccgcagtgaccacttttattgctaaagtcgaaggaaacattacctatatcgatcaacatgttgatgtagagcaaaatgttttttttatgcgactggaatgtgaactcaccaatcaacatgtgagcgccgaatcgataaaagaagatttttcaaaaacgattgctaccgactttaatatgtcgtgggaattgtacaatcaggaacacaaacctaaaatggctctgtttgtctccaaatacgatcattgtctgtttgatattcttgggcgttacagtgctaacgaattaaatatagaaatccctgtcattattagtaatcataacgagttgcgatcagtagccgaacgatttaatattccgtttcactgtgttccatttacaaaagacaataaagaagaaggtgaagccaaacaaattgaactgttaaaaaaataccagattaacttcattgtcctggcacgttatatgcagatcgttacccctaaattgatttcgctttacgaaaataaaatcattaatattcatcattcgtttttaccggccttcccgggtgctaaaccttatcactcggcttttaaacgaggggtaaaaattattggagcaaccagccactacgtgacggaacaactggatgaagggccaattattgaacaggacattgcgagagtttcgcacatacattccgttgaggattttattatgaaagggcgtgatttagaacgtatcgttttagccagagcgataaaattacatgccgaaagaaaaacaatagtttacagtaacaaaacggttgttttttcttaggctcaaagccgcagaggttcaaagggacatagatttccctcttaactaaaccactctgcactgaaagtgcagaggtttgttttacgagggactgaaagtccctcttcttatttcattcaggagtgagcaatatagattttttcttgttcagattatctaatctttttgcttaatccccaacttttgaacctgatccaaagtaatttttctccctacaaaatcccaataaaaaaagcttcagagaaatctgaagcttttgttttgataagtagtccgtgggggaatcgaaccccccttaccaggatgaaaacctggcgtcctaaccgatagacgaacggacctgctttgttgttgcgggtgcaaaaatacaactgtttttagaatacacaatagcttttttgaaaatttttttctggcttattctggaaacagggcctttagaaataaccaatcgcagaggggtagaatgaattaaagttgtattcatttgattaagaattggttgttttgacagtaaaaaacaggaaataagatttttcttttcttttattaaaatgatgcctttcaaaaaaaatgaaaaatatttttgcaattatttgttttgaaggaaaattcatgcgttttatttgggatttttcgaggatttttcaagaaaagtagatatcagataaaacttaaaagtatattgtgcgaatgtattttggtttcgcacttgcaatctgaatcaaatcataaattaattgcaggacataaaaacaaaaatagcaccggcttttttgggaatgaatcggaattatattctggataagtttcttttaaaaaaaactttagaggaaatcaataaaaatggataaaaaatatatttttagtgcttggaaaaattaaccatttaaacttcacttaccaccatgaaaattatatctaagatagtactaatttgctttttattattctcctgcaaggaaaggaaaaaagagttaaacgaaagattaaataagaaagagattttggttgagcaggaagaagatttaataacagctaaaaaagagaatgtaaataataatgtgaaagttaaattttccgacttaaccattttagtaaaagatttgataaaagaggttgaaatggattggcgtaatgaatcagatcaggatgattatacttatagagcagaaaaagatactgtttattttaatcttattcctggtgattggatgtttgacaaaacatttaagattgaacaaactgagtttgaagagatagaattgtatggacaaattgaagtgaaaataggaattgaaacagaacgagagattgaagttccactttgtgttattgacaattggaaaagttacaggtcagaatggagaaagcttaaaatcaatcaggaagatttaaaatttatatattttgatgaaagtgcggatcctccaataaaatttacgattgacgaactcaaacttgctgtagaaaaaaattgtggagctgaatggtttgatgatataaagaatattaaatctcttgaaaaaatagacactagtttttttacaactaaatacatttataaaataagagcaaagaatagtaaaacaaatcaaatagtagaaaagtattttatatttaatacccctacaagctgctaaaattagtaaatattatagctcttcgaaatcgccataaaagttgcgcagatgccttcacttacatcgtagtgctacttatgatacctaattgaacatttgtatgtatatttgatatcggtgttttaattcagcatttgtgcttctaacaccacaattacaaacaaaaatacggtgtcccacttcagagaaaacgatcttatgtacattgaacaaataatagaaactataagtaccacctacgttacgttaacagaggaatgtaaagacgatctcaaaagaggggcaaaagttttgacgtttgataaagagacagtgcttgtaaaagaaggccagtttgccgataaactctattttataattagtggaagtgcaagagcctattatactaaaaatggcagggatattacagattggtttgcatttgagggtgattttgtaagtgccattgatagctttttccgaggcggtccaacgatatacaatatcgaattgctagaacccacaactttgttgcaaatttcaaaagaaacagtattggcattgagcgataaacatcattgttttgagaaattaggaggaattgcggtaactaaaacaatgcttaaattgcgggaaagagttgtttcgatacaatttgagagcgctttgcagaaatataaaagtctattagatacgcgccccgatattattcaacgcgttcagttaacacacattgcttcctatattggtgtgacgcttgaaactttgagccggattcgcaacccaaaataccgaatttgatttagatcaaatggattttcaataagttgattgaactttgcagaaatcaaatgagatgatacgaattcattctatttcagggctaaccattacagtttttattgggttacatctattcaatcatttttgcagcatttttggtgtggtgacccacattgcaataatggatactttacgattgttttatcgcaatacttttgttgagacaattttattagtggcagttttggttcaaattgtatcaggaatcaatctttttaagaaaagcagaaaaacagcaacatcccattttgagaaactacatatttggacgggactttacctggctttttttctaattgttcatgtgagtgctgttttcatcgcccgcctctttttacatctcgataccaatttttattttggtgtggcaggccttaatacctttcctttttattggttttttgttccgtattacggacttgcaattctttcttttttcggacatatcgcttccgttcataataaaaagatgaaaagcaatgttctgagtttaactccggcacaacaggcaaaatcaattcttatattcggatttgtgttaacaatcattctattttatggactgaccaatcattttaatggagtaacattcccaaaggaatacagaataataatagaaaaaataaagaaagtatgattgagaaaagaaattttgccgattggtttactggtgtatctaagaacttcaaaaaaaataaattatgctaaaattaggaggatatatcaatattgtaattgcaatcgctcacatcgtcggattgttatgggcggaccagatgtttgaaattacgggaattggaaaagaaatggcaacactagctcaaaagcacagtactttgccttatctgctgaccattattgtggctattgtgttttttattttcggtctttacggcctttcggcagctaataaatttagaaagttgccatttcttaaaccggttatctttttaattgccggaatatatctgctgcgtggaataggagaattaattgctgatacaatacagggaacaaactcaatagctgaaacaatatattctttagtggctataataatcgggcttttgtttttaattggcgggttgcaaaaatggagagcggaaaacaacattttgttatgaaagtaatcaatctgcatacaagaataattaatcagcctaaacacaaaatcgaagaattgtttagaaccttatcgtctggaaacgatatgatgctggcaacagacaaatggccgccaatgcgattagacaacggattaagtattggttcaaagggtggacacgggcaaataagatataccgttatggattataagccggaccattatattcaatttcaatttacagaaccaaaaggatttaatggatttcataagtttgaaattacgcagttagatactaatgtaaccgagctgaaacattctattgatatgaatacaataggtttggcgaccctaaaatgggtctttgcaattcgttggctgcacgattcttatattgaagatgcatttgataaagtcgaaaaccattttacaaaggaaaagaaaaataacaagtggaccatttggataaggtttttaagaagaatttttaagcccaaaaagaaataaattcctaaaaattctaccccattaagggaagagttcctgatgaaaagcagtatgttttttttggaatttttataaattataggcaaaatcattttttatttcttccatcacaaatgaactttgcacatttgaaatccctttgataaccgataatttatcgatcacaaacttttggtattcgttcatatcattgaccgccactttcagtaaaaaatcataatttcccgacacgtgaaaacaacccattatttcgggcaataccagaatatgctgtttaaaatcatctatcaattcgcgtgagtgcaccgccaaagtaacctgacaatatacactgattgattttccaattttttcagaatccagcaaagcgacataattcttgatgtactgcttttgttccagttttttgattctctcaaaggtgggagaaacagataagcctattttatcggcaatttctttggtattttgcttcgcatcttgctgcaaaagcatcaatatttttttatctatggcatccatctcagaataattatatggttttagaaaaaagaaatagtaaattcaatattaaaaaacttaattatgattcaaatttagaattatattttgagttttattgttaataaagaatattaaaccataaaaagtacatttacagaaaaattaaatgttatggcacctatttcagaatcattatccatacaagacaatcaacgtttagtcgatttgaatcaatacatcgaaaatgccagagataatttcttgggctatcctgtatccaaagattttgattattcggaaatcagtcattttttaaaatatccgatcaataatcttggtgatccttttgaagactgtacctacaaagtacaaacacacgaactggaaagagaagtggttggcttttttgccaaattattccgcgccaatccaaaagattattggggttacgttaccaatggcggttctgaaagtaatttgtacggactgtatctcgcaagagaattatatccaaaagcaatggtgtattattcggaatcaacccattacagtgtgcgtaaaaacattcatttgctcaacattccgagtatcgttattcgctcacaggaaaatggtgagattgattatgaggattttgaaaacacgttgaaactgaatcgccataaaccggctattgtactgactacttttggtaccacaatgaaagaagccaaagacgacgtatcaaaaattaaaaacattctaaaagcattagccatacaggatagttacatccattgtgatgcagccttatccggaagttatggtgcttttatggaaccgcgacttccttttgattttatggatggtgcggacagtatttccatcagcggacacaaatttattggttcaccaattccaaccggtgttattatcacgaagcgttctaatagagacagaatctcgaaagggatctcatatatcggttccttagatacgacgattacaggatccagaaatgggcattccccgttgtttttatggtttaccctgaaaaaattagggattgaaggtttaaaaaagcgttatttacacagtctggaagtagcggaatactgtgagcagcgattaaaagacatgggaattgctgcctggagaaatccaaattcgatcactgtagtttttccaaaaataaccgaagaagtgaaatcaaaatggcaattagccactgagggcgatatctctcatattatctgcatgccaaacgtaaccaaagaacaaatcgacttgtttatcaacgacgtagaaaattgcattgaagccccggaagaaatggcagaattcagttggtagtgttttagaatagtatggttcattctgttctgtaaaagagcttataaaaaaagcgtaaatgtctctgactttacgcttttttgtattgtaagtggtttgaatactaataatacaattttgtattaaacttgaggtaaagtcagaagtttgatatcgttttcgttttttatattagatttgtttttagagaagacacaaaatcagagatatttgtgtaacactcaagagaacagttcgaagaggggggaggcttggccaagcgcgggatatactattgatagagcaacactttaaaaaaagcattatgaatgatcattataatttgatgcagctcaagttgttgataaatgaagtttttgaggtagataatatcaatttggacacggcagtaaataagctccaaacaatatcagaagataatgattgttttataggtttatttaaaacaaaatttaacatagatatgaatgcttttgattattatgaatattttgatgaagatgaatttatattgatttcaatttttagaagaatctttcgaacgaaaaaagaaaagaaatcattaactgtggaacatttgttatcaattataaataaaggggaatggtttgaacctgatctctaagtataccgtcccgctcggcgaagtgttcatctgcaacgctgtggcgaatgtctctgacttcgcacccgcaaagtgattaagttttcttgtagaagatgtaatttggaaatgatgattaatataaatagaattaagaaaagtcgggagatatttagtcatttgatttaaaattaatccgtttagtgtacttcgaaaaaataaaactaaacacatagaaacatagtttctaaatttaaaaaagaatactacagagaaatatttttctctcacatagttaatgtgtttttgaaaataagtacaactttttaaaacctaaaacaaaaaactcagtaccttagtacattagccactcagatcctttaaaaaaactatttcgctgccgttggcaccgttgctttttctccgataacaacttcgttgagcaatacatctttggcattttcgcttgaaatcgcattttttgcccacttgatattgatagcattaaaggagatgttacgtacttttttatccggaaatccctgaattacaattccggatgccgtggccttgttgcaggtaatattggagaatgaaatatttgaaatctcagattgaaaaccgcttccttctccgtgataattggctgtgatatacaaacaatcctcgacctcatcgagttttacgtttcgcacaaaaacattcctgatgaaaccgcctctgtcagcattggttttcaaataaatgcctcgttttaaatatcctgctgtttcacagttttcgacgaatacattctgaactcccgccgacatttcgctcccaatcactactccatgaagtcctttaaacttgcaatttctaatgacaatattctcgcttggagtagccgaattagctcttccttcatgatctcgtccggcttttatggctacattatcatccccattatcaaaggtcacattttcaattaaaacatcttttgcatactcaggatcaattccatcgttattatgattcaatgatttgtaatgcacaccacgcacggtaatgctctgcgatttcaatagatgcaaacaccaaaaaggagaattttcaatatgaatattttcaaccaaaatgtttttacaatttaaaaactgaatcatctgcggacgcaaaaagtatccttctccaaacttcctgtcctcaaaaggtgtactattatggttcatatcacgacttctgttttttccggcgccttcctttgctttaaaacttttccagattttacctccgttaccatcaatcgttccttctccggttatggcaatattcgaacattcattagcataaatcaacggactgtaattgtataacattgttccttcccaactcgttaaaaccattggtaaataatctgtcggagtatcgctgaatttaatttttgcccctttttctaatttaagattgacattactcacaaaatgaatcggaccattgattttataaattccttttggaacaatgattgttccgcccttattctttttacacaaagccattgctttgtcaaagaaaggtttgttattggtaatggaatccccctttgctcctaactttaccatattaatttgatacgaaagaaatacgggaagctgaattctattgacaattgaatcaaccttagtcgatggaaattcagtactctgagcaaaagaagcccaggaaaggaatagaaaaatgaagtgtttaaaagtcatgtttttttaaaggttcttaggttctgagtggctaaggtgctaaggcttttgcgaatcttttactcttactttatggctgcctgaccggaataccaatttggaattgagtcttttagaatgttttctgtgctgtagttttcagcttctttttttgtgagctgatgtgaccatgaaactctttttgcagaggaagctccctcgcctttgcaattgtattcggcataaaaagccgttttttccgcttcgggttttgaccaattttcccaaccttccggtctgatatgctttcccaaatcacagttcatataaacggttttggcatagatacgccaaggtctacctagataaactgctgttgctgccggctcagccgtgagtttgcaatttttaaaaacaaatccaaaagcggttccttcaggtgttgaagcagcagtaatataggagtttttgatactgtgaatctcgcagttctcaaacagagctgttgcacttccgaagataaaatcggttgttccttcgatgtaactgtctttaatgtagtgtttggcttcttttccggacaaatagagcgtatcctgatttccgagaattaaacagtttgaaatctgaactctgtttgctacaacagacagtgcaatggcctgaccgttatcacctgaagcatttttaatcgttaaattggataccgaaaaatcatcgccttccactaaaagggtataggtatgaaaagtactatttctccccacgttaatcttagagaagttatcatcaaaagtaatgatggtattttctttgctttcaccaattagagccacttgactgttccattccggaatacggattttctccttgtaaattccgtttttcacaaaaacagttaccttttcataaggaaaagaagggcacgcatttatagcatcctgaatttttgtaaaatctcccgaaccgtctaaagcaacagtaatccggttacttttttgggcatttgaagattctttagacgttatttttactccgttttttacagcccaggcggtgtattttttaagtacttctttgggtgaatctgaataccaggaatagccgtttcgtctttcggcaccaatttcctctattgatttttttcggattccgtcacgatcacaaaagaaaggctcattggtagaaagatccataaatctcgcccagatcggggctgcattttgcgttacaatcatttttttatcgatcacttttccggcgtcatttaaaacacgcttttcttccagattggtgatttttgttttttcaaaccaaagctttgcgctttgtacggctgtaataatttcaggagaaggtttttcgaccgacattaaaagcaatacaatttttgcggattcagagccgcttaacgatgccagttcgaatgctcttgcgtttgcaggtgtcaaagtaacctcatcgtgttgtgcacaccaggctgttaaaataccattctgtctgtattgtgtttttaaaatacaatctattcctttttggaaagattctttcgctttttcgaccattgctttagatggttttatactaaaataatcggtttcctcacttacttggcgtataatgttcaggatattcaccatcgaatcatcattgtatgtgatgtgcgtgtaatagcctttttttaaagggtaaaactgaggccatcccccatttttatattgggcttccaacaaataattcaatccgtttaaaaacgattctttgtatcgatcgtcttttacctgcgcgtacattttagacatgaaaagcatctcctgacacgttgccccattgtctgtagtcgtttctgcagttgtttttttaagcttcagtaaatcctttttctgctccggcgttaattcattctgcatttgaatgttcttgggccacccgcctatctctctttggtagagcagtacattctctgctatatttttggcctcatcggtaccaaaccaggctgcatcattttttcgaatgacatccggccagtttttataggtgttctgtgcctgaataccaaaactcagagccataccaaaaagcaataggatattttttaacttaatcattttaaaattttattttgttattctaatccaataaacccgacaggttttaaaaacctgtcgggtttatagtatattatctgtttaattcaacagctgctagaataaatggtcctgttgctttaggatcgttgtcttttttcttttcgtttacataatacgtatacgatccatcgcgatatggattccctcccaaacctgccacctgacaggcttgcgtaagagtgattccaccatcagcatctaccctgatcaattgtttggttaaaccgtcaaaagctttatgggccaaatttttatactttgcaggcagatatcctttgttcgctccttttgcaaaagcataagcaaacattgacgatcccgaagcttcaagatagtttccttctgccccacctttgtccgtaacctgataccataaaccggatttgtcctgatatttagctaaagcaaccgaagccgtattcaggtattttaccagttctttttgtttcggatggtttttagggaaataatccaaaacatcaaccaatgccattacataccagcctaaagctcttgaccaaaagttcggagaggttcctttatccttatttgcccaaggcatttgtttgctctcatcccaaccgtgatacaacaaacctattttaggatctgttgcatgcaattgaattaactcaaactgtttcgcaacatcatcaagacttttccctccttcaaaggtaacagtatattgggcataaaatggttcacccatgtacaaaccgtccaaccacatttgattcggataaatttgtttgtgccagaatccaccactggctgttcttggctgctctgtcaactgcttgcgtagtagctgaagcgcttttaaatacttttcatctttggtagtagcgtaaatatcaaacaacaagcgtcccggtacaattaagtcaatattatacttgtccagttcataggttttaatcgtaccgtcgttttgaacaagaacatctgcatagctttttacataggctgcgtatcttggatccggattttttttgttcagttcttcaatagcatgtaaaaccaatccatgaacataatcccattttgctatttttgaatcatcgatcctataactttcgggatgacgtttcattaaagtcaaagccattttatcagaccattttaaatcctttccgatcacaatttctttgtttgaaggttcctgcgaagtgactttacagcttgcaaagaccatcagacaaaccaacgtcattgctgtaaaataaccttttgtattcttatttttcattgctactttattttaaattctactatttatctaattctaatgcactcagcaaaaatgcagcaagagccggtgaactattgtcctttgccttacttttgatataatattcatttgatccgtcccgaaatggttttcctcctaaacccacattcgaagatacctttgaaatcacaatatggccctgatcgtcagtagtcacaaattcttttgcgtaggattcaaatgacttttgcgctgtctttttatagactgaactcaaatatcctttatttgttccttttgctaaagcataaataatcatggctgacgatgatgcttctaaaaaattcccattcatttcgggcttatcagcaatctgataccataaacctgatgtacttttatactgtacggcagttttggcgatttgattcaggtattcctttagcactttgtacttggggtgtgtttttggatagtattccaatgtttcaaccaaagccatcatgtaccagcctataccacgtccccagatggttggcgaggttcccgtttgcggatttgcccaagctatttccttactctcgtcccaagcctgataaaccaagcctgtatttttatctgtcaaatgatcgtgcaccaattcaaattgtctggcaatatcgttcaaagctttaccattttcaaatttcaccgtgtattgagtgtaaaaaggctcggccatgaacaaaccatcaatccacatttgattgggataaatttgcttgtgccagaatcctccacttgcggttctgggttgatggtctaactgatcccggagctcctgtagtacttctaaataccgtttgtccttagtttcgtcgtaaagtccgaacaacagtttgcccgggttggcacaatcaatattgtactcgttcttatcatacttcgcgatctttccattggcatcaatcagttcatctgcatattctttgatataattgaaatattttttatcgtttgttttctgatataatttttcaaaagcaaacaaaacaaatcccattttataatcccattttggcttttcagttccgtcaatctgccaggcttttggatatttatctataattgtaagcgctgttctctgtgaccactttaaattatcacgtaagacgttattttcagtcgtctgcgccattattttagtactgaaaatcaacagtaaaacaatccaattggtttttataaaagtcggtttaagcataaaactaacattctggtagttggccttttttgccacagattaaaatggattaggttaacttgtgtattaaattacgaatatctttttctctcgcagatcataccgatcatgcagattttttaatccttttaatctctgacacacttcactctttactcatcactcttcactcatcactcttcactcttcactcttcactcttcactcttcactcttcactcttcactcttcactcttcactcttcactcttcaaataatacaatttaacattcaaagacaagaaaaacgtccccagtactgagaacgtctttcggaaatatatatatactaattctaaaaatacttgcttatgctttcacgtatgcatcatcatgaacactcgctacagctcttcctgaaggatcgttcatgtttttgaaagcctcatcccattctaaagcaatttttgtactacacgctacacttgcttcctgaggtacacataatgcagccgcgtcacttggaaaatgttccgcaaaaatagaacggtagtaatactcttctttagacgttggtgtctgcaatgggaatttatactttgcattggccaattgttcgtctgaaacttcttgggctaccacttctttcaaagtatcaatccaactgtatccaacaccgtctgaaaattgttctttttgtctccaggcaacactttcaggcaacatgtcttcaaatgctttacgaacgacccatttttccattggatgctctttgttgatcattttatcctgtgggttgattctcatggcaacatccataaattctttatccaaaaacggaacacgtccttcaattccccaggccgctaaactcttattggcacgtaaacaatcgtacatgtgcagtttccctaatttacgaacgttttcttcgtggaattctctcgcgtttggtgctttatggaaatacagataccctccgaacaattcgtctgctccttctcctgacaataccattttgattcccattgatttgatcactctcgccattaaccacattggtgtcgaggctctgacggttgttacgtcataagtttctaagttgtaaatcacgtcacgaacagcgtccaatccttcctgaatggtaaatttaatttcatgatgaatggtaccgatatgttttgctacaacctgcgctgctgctaaatcaggtgatccttctaaaccaactgaaaaagagtgcaattgcggataccatgcatccgtcgtatcatctgactcgatacgtttttgtgcaaattttttggctacagccgaagtaatagacgaatctaaacctcctgaaagtaaaactccgtaaggaacatcactcattaattgtctgtgaactgctgcttcaagtgcttttttgatttcaggaatactggtttcattgtcttttactgcttcatattctgtccagtctcttttgtaccattgtacaaattcgccgtctttactggtcatataatgtcccggaggaaacagttggatttttgtacagtacccttccagggcttttaattcagaagcaacatagaacgttccgtgctggtcccaaccaatatacaatggaataattcccatgtgatcacgagctataaaatactcatctttctctacatcatagattgcaaatccaaagattccattcatttcatctacaaaatgaggtcctttttctctgtaaagtgcgaggattacttcacagtcactttcggtctgaaagttgtattttccctgaaattgtttacgtaattctctgtggttataaatttcaccgtttgcagccaaaaccagttttttatcttccgtaaataatggctgttttcctgaggccggatctacaatcgccagacgctcgtgtgataaaattgccttatcattactatatattccgctccagtccggtccgcggtgacggataattttagacatttccaagacctgaggtcttaaagtctcagctttttgcttcagatcaaaggcgcatacgattccacacataactatatattttttaattataaaattttaatttgatgaagcaaagatgcgatatcagttacaattgaaaaacacatatagcagtttcaattacaatttaaaactaaaagtgaatttttacatataaaatataaaatttaagtataaaaaaaaggtctaaacttaaaaatttcaatttcgagcttcataaaagaaaaaaaaagcaaacgaacagagaaatatttaaattaaatcacagcaaacatcagaatcattaacagattctcaaagagaagaataaatactattctgaaattattgtttcaatcaatcccgaggtttagggagaaattatctaaagattgataaactttatattgatcgttcctaaggaacttattgattggtattcatgccccttcaacagattaaaatccgttgctgcaagataaaccgttcctccgggacttgtatataaaatccttgatctttacatatattgcaacaacggatttcaatctattgaaaaaagtaattaacaatacatagtttctaaagagcaagatataagagccttgggctcaacatgtattgtagcaacggattaaaatccgttgaaaaaaaatcatcaacaaaacaaagttccgaaggaacgacacaattaaatttaaaaaagtctaaaaagaaacactaaggaaaagctttgaaaaaataaacgagtccacctatagtcatcattactattatcgtccaatttttgaaagactgaaaattaatttgaaatttatattgatcatttttttcaatcgcatcctttaaccaaagcttgtgaagtttataaaaagcaaaagcagctccaaatagagagaagctgcatattaaactcaaataatccatttaattaacttcctgaattaaatattttgtgctgttaatttcaaaagtaaaccccactttatttcccatcaagtgtgctcccaaaggagattgaggtgaaagtgcaataacatttataccttcaatattaattttaggaagtgccacacttacatacaaaaagattccgttggcttttaccaaacttcccgaaatgatattttcggttgtttttgaagcatcaattttgtctaaaactgctttttgagtgattgcttctttcaatttattcgtcaatttttcctgctcgatatgcatcatcgacaaagcggtttcatgtttgtctccggcagaacctttggcatcgtttttagaatcttcggtcagagccgaaatcatgtctctaaaaacatcaattcggtcctgaaccatttgctggtaatgtgtatgtattttttgtttgaaagtcatttttttttgaggtactgaggttctgagttgcaaagatgcaaaggttaaaattagaaatgaaaaaaaatacgcttaacctattatttcatcaggaatccatccttcatcattacttatcatttttcttacccatgaccagccgttcaaacttttaatttttaggatctcatcgcctttgtcaacgtcgagttcttttgcagtgtaatattctaaaactttagcctctttattatccttagaaatttcaagtatctgaatgggtacccagcctccattaattccgttatctgcccaaatccaccctttccacttttcttccgtttcctcttctcctaattttacaatctcacccttatcgagagtaataggattttcatattgtgttttataggtttcaagaattttaaatacttctgtcattatacagctcttttaatgaaatgagtttttttggaggtactgaggttctaagttacaaaggtgcaaaggttttatacagtctcaaaaaagatagccataaattcacgaaaaaatattcgtgaattcgtggcttaaaaactttatatacttttatctctcgaatattttctaaaaactagacctattattcacataaaccattgaaaataaaaacgttctgaagttcttagctgcaaaggttttttctctttgttttattttttattcaaagaaagccgttggataaactacttttccgcttactcctgacaatccattttcggttaaaggaatcaccatgcaattttctgccggaacatcgaaaggcatttcgatatggtatttttcacaaagttcataaccaaatctcggataataatcgggatgtcctaataagatcactgatttatatcctaattctttcgcgacttcatgagcacgcacgataagcttcgaaccaattccctttccttgaaattttggcaatactgaaacgggagccaatgccaaagattcaaaagatactgtatcgtttttaatttctaatttcgtcaataaaatatgtcctgcgatttcattctctacttcggcaacaatagataattccggaataaaagcatccgatttccttaatctttcaaccaaaaactgttctctatggtcactatattcttctttttcaaaagctttctcaatgagattaaaaacacttttgtgatcgttttgattttcttgtctgagtttaatttccatcttaattgttttaattatctgtctattgaatcgcaaagttcgcaaaagtttttatcatgaatcgcgcttagcaaatgcaaagttcgcaaagctttatgttgaaatagctttgcgaactttgtgttttatctacgtaacgcaaaataaaaatctttgcgtgctttgcggttaaaaaaaatttaaaaatcaaatttgtagtttgctccaactactacctggaatccttgtaccgggtaattcagccatttttcataggcctgattccctatattattcaatttcagaaaacaagtcaaacgctcgttgtatttataccccaaatgagcattggcatcaaaatagctttttagtgttgtaatcaccggatcggttcctaagcttagattcgactgcatgtcttttcgttctcctacaaagaaaacattcagtcccgcataccattgtttagtgatatttacatccagattagaactcaatttcatagaaggcaaattccatgcttctataccgtcatatttgtaactgttgaaggttccattgattccgaaagaaacattttgagaaaaatcagcttttaattccccataaaaacggaaggttctgatatcatcataaatcactccaaaagagtttccaaagccataattttgattagaaaaatcttctgtgtaatcgttgcttctgtatagtgctttatctttttcattcaaataagaaccggtaagattgtaactaacattgttggccaactttccttttaaacccgcaaaaacagtatattgattgttggtaggtttcactaaaagtgttggagataaaaacggattttcagtcacaaaatcagcataggagttttgatttaaacctccatttactcctgtataaaaaatcatcaaatctcctaccagcttataggaagcatttacttttggataaatataaaacttgttcccgctgttttcagaatccaagccataaaacaaacctgctcctaactccagtgtccaatcattttctaacattacaaagcttggttcaattccaaaattagtcagactgtatttcaagggctttgtattatcatacgcataattatgttcaaaagatccgcttacgtgatctacaataatattggtattgatagcctgatccattatatctaccttaaaagaaggttttacataaaaacggttttctgatgacgaaaaactatctgaaaaatgcgtaaacttagtcgaaatcttactaaaaacaccttccgtaaaagctacgttaccgcctaaagaaatggtattgtacgaatgatttggattaattcctcttattaaatcatcacgcatctgtcctgctaaagttgatccaaaatcagccggtaaaccgtaccaattgtacaattgattctgatagcccaaatcgacattccatgacatatcacgattgtttaccccatatcccacattcaatgctgtatcataaaactcatcgtttaattctacacctttaattcctccctgagaagaatggtgacgaaacatacctgccacataatcgttgtttcctaaatcctgattgacaaacaattcagcctttaaagttccgtaattccctactcctaacgtagcataattattaaataatttttcttttttagacttctcaacaccttctgcttttccttttgaaggcgtaaaggtagaggctaccggaacagataaaatactgtactttatagtttctttgggctgatttccgctatcgtcaagcgaaggcgtctcctttactttgaaagcatctgaaatcgttggcgaataaggctttactacgtttactgtctctgtaccgattgtttcattcttcttttgcgaaaacgaaagctgcacaacaaacagtactagtaagatgatgattttattctggcaattaattttcatatatcttttttttgagaagaaagagaatagaataaagagtacagacttccctccttttctaaattttctttttactctataattcttttctctttactctttactctttactctttactctttactctttactctttactctttactctttactctttactctttaatcattctgtagattggcggcctaacttttaaattacttaaagtgttatatttgattctgacagatgcgacagaaccttctacaaatattatggaagatttgaaaagattgttatagttgaaggaagaattgtctttctttggctctatgaattactttctcggatttaaaaataaatctatttgattttttatttggttaaataagtcttccctcatttttgtggggaaaatgtcagagttgaatggtcagttaaaagttatttaatatcattcgccttcgctttttgtgtgagaaataatatctagcccatacaggaagtagagttacaaagtgccttgaacatatttttattgtatctgctttttttcattgcctggagaggtagccacatcttaatctgcttttagcgtcattgttttcggctgttttaatccaatttgcatcattgccggattagtaaaacaaagaaagggagttattactgtaaatagtaaagacagtaatttaattctgtttttacatcttgaatattttatgattaatcttgttttgctgattttacttcatcagaaggagtgttaagtataaattctaccattaggcgtttgatatcattccctttttcgttcagcatattatgaccgcataaaggcaatccgaccagccaggttttaggtctctcttttgctatatttaaagcgctttcaggcactgcaacccgatctaataaacaagttataactaacattggcgctgtaccacccgtagaccactgttcttttggtgtggcatcactagacttggcttgttgtccggccaaggctggaaattcgccttgtgcctgatccagcaaagccaaatgctcgttgcctggagcatacataagctgtccttgcaatttaagccattcttctttgctgattgagggatccatgtagcgttgatacagcgccatagtttctgcagatggctgtgcttcaccgcctgcaccaattaaaataatgcccaatacacgttcaggtcggtcttgagaagcggttctcaccacgcgatttccatacgtttttccagccaggtaaacttctttgagaccgagttcgtctgccactttccaaagatcatctgcataatcgtggagtgttaatccctcaatttttccagtactggctcccaaagttcggtagttgtaggtaacaactttgattccttttgatgcaattgcctgagcgagttcatcgagctggattgccggtctgccattaccggctgccataattaaagcggcaggaccatctccataaataaaggtttcgatttgaataccgtttgcttgtatcagctttctgatccccattgagttgtttttttgggagtatccaaatgttattgtaaataaaataaataaggccagcaaacgctttgagggacaatgatgtgaatttttcattttacttttttattttaaacaccgtgtttccttctttgatggattccagaatttgaatggtattcaagtctaaaggttttatttttaatggatttttatccaaaattaccaaatcggcaagctttcctttagttaatgtaccctttgagttttcttcaaaatattggattgctgcccattctgtcagtgttttcaatccttcgtaaggagtaattcgttggtttggccccaatatttttccgcttctggtgaccctgttaaccgttgcatcgagtactcgcatcgaattagggaaggtaacgggtgcgtcatggtgagaagttgtaataagtcctgcatctattgcatctctcatcggcgagatataatcagctctgggatgccccaaaacggattggacatgccaatcgccccaataaaaagtatgcattggaaataatgaagggatcacttttaggcggaccaattcaggaatttgatctttgcgcaatgtctgtccatgaatgagtaccgttctgtgatcgggataattgtattttttttccgcgagatcaatcgcttttaaatactggtcaattgcagcatcgccgttggtatggcacaatagctgccatttatttttaaaggcaagtgctacataatcatccgcctgttgatcggtcattacgccttgtcctttataatctgctttttcacctgcaggcggaatatggtaagggtgggagagccatgcagttttaccttgcggcgaaccatccagcgttaatttcacaccgccaattctgtatttatttttatagtgatgcgtggggctgtaataagggcttttcataattttttctacacccagcgcaacatcaggataggaaacaatatctaaatagaactttttgctgtttgctccatcttctaactgggacatctgctgtaaagtagccctgccttcttgtacagtcaaataaccatttttagcatactcaacgagcgctttatcaataaacatagtattagcttctgcatctccttttcctaaaattgggaatagaacggcaaaaaaagcaccttcttccaatacgccgtttggcgtcccatcagcatttctacgatattttccaccgacggggtctttggtgtccttattgatgcctagcattttcatggcataggagttaagtacccctaaatgtcctgattgatgtacgataactactggttcagtgctacttattttatccaaatcagcagcttttgggtggtccgcttctttgagctgggaatcatcgtagccatttcctaaaatccagccaaattttttaagcatcgttttaccgtctgctgaatttttatattggttcactgcattgataattgaagcaaaatcggcaccgggaccatccggaggcggcagtaaattagcgaccgatgcggtaaaaccaacattaagaaaatggctatgggcatctaaaaatgccgggagcatcgtttttcctttcagatctaccataatgtgtccagatcctgcttgcttcatggcttcttcttccttgcctacaaatagtatttttccgtctttaactacaatcgcctgggcataagtgggcttttttccttccatggtgatgatgtctccgttgtaataaacggtagctttattgcctgaaccttgatctgccgccaatttttcgtcttttttacaggagaccgtcaaaattgcaaatgccaatattgataagattgaatttttcataagcttattagttaattaaaaaaataaatcatttgatttttatagtttcacttctactaattccgggcatttccaagttccattcaaaatttctttgtgaggcctgtagagtcgaatcatataattccatcccttcatgatatataaaaaatttggctggttgggatctcctccaaaatgtatggttacgctgccatccggattcttcttggatgttatcgaattgaaattatagctattgtatttatttacttcatagtaccctttttcattgtataaagacacagaccaaaaagcatcaacaggaacatctttcagagtcagggtgtaagcagttacaccatcatctttaggtggatttaaattaagataaatagcatctttttctggatttccaccgtatccccccgctgttcctaacagttgtcgtacttgggttacttcccattctgtgccaaaagcggctttactgttaggtaaatctttggccaatgccaaaagtaaattacgcgtttttgtaaggctctcttcatcccaatcgggaatttccaacttgcccgtacttgcttgtttgacaacaattgactcttgtattcctgttactattttattgtcttcagaactattcggatctgccaaagttctgacggttatgtgaataaagtgagtacccacattttcctttgtcaaggtataattgcccggttcataaaaaacccggatataggaatcttcattaataaccatcatcgatataaaacgccctttggtctggggtaaggtaatgctaaggggtgagctgagatcaaaaatcccataagaatacctcgtatcacgattggtacggattatatattgatgattaacatctgcagggccgctgttgtggcataatttaccaaagcacccatcatttgttctgattttgaaatagttatcagtttcggcgcggacaaaattatcgactgttactttttgttttccattgggcagggtaattggatcaaacagcttttcggtgttctttttgggtggtttgctaaaggtgttaattgtgggactcaatttttcaattgttttacttttattagtattctggctgtaagcactagtgaataatattatgcacgatgataaaaggatagatgttaagattttcatgctatttaactgtttaattgattaaatatctgtatgcaaatgattaaaaattattatttaaataatctgttaactactcttttaagggaaatgatttgccttcaaagacagtttctaacactttaatgtctttcattttcatagggtctatctttaaagggttttcagaaagtattacgaaatccgcttttttacccacttttatggatcccgtaattttatccaattgcattaaattagccgcatcaatcgtgatacctttcaatgcatcataagtcgatactctttcttgcgatgccatcaaagtaccatcggccgttacacgattagttgctatccaagctagcagcaatggctgaataggagccatcgtgaaatcggaatgcagggcaaacttcactttatttttaaccaatgagcccaaacgaaccatttctgagcctctttctttaccaagaacagtattggctacatatttatcacccatagaatagagatagtagggattagcagacaccaccgctcctaattttgcaatacgagcagactgctcaggtttagattctccaaaatgctctatggtgagtctttgttttaattgtggtaattctttttgtaatttttctagttcatccaagatggtttctaatcccatgctgccattgcagtgaatatggataggataacctttgttccaccaaaatttcatggcttcatttaaattttcaggggtcataatccatttaccgctatgcccgtccaaatatcctggaggtaaaacttgaaaattctgaccaaaaaatgcaccatcagcataaagttttacggcatgatctattataatatgtggcgaagtttttttgccaaactcttttacatcggaaaacgttttttcaaaatcaccgccatttaccaggttcaatgtatttacatcgggggtaaattgcatacggaaaggtgttttatcgttttccagattattcttcatgtatttaaaatcgccccaaagttctcccgatgaacctgtacccatatcgccaatagtagttagtccgcccatatgtacaaggtcacgaagttttaacatattggtcttcataacttcatcatttctaatggtcggtgcccattttggaacaacgacattgaaaaatcctgcttctacaaattttccggcggcataatcaacttggctgtttcctttgatttctttctcggtaatatttaaatacttcagccccgcagtgttcaaccacattacatgtgcagaatattgccaaatcataattggtcgtgtagcagaaattccatccaattctttacgtgaaatgtctccatgaaaaggctccataaaaccccaaaccacaagaggttctttaggctcttttaactcagcttcatattcttttactttggctatgaatgcttcatgtcctctcacggccttgacagttccccaaggaaaaacccaatcaaaaggtgcagcaaatttggtgttcaaaatcatagcaccaagattgggatgcaagtgtgggtctatcagacccggcatcattgtttttccttctaaatcgaccatattatgtccttcaccggctttcttcattgcttcatctttacttcctgtgaaagtaatttttccgtcttttaccactactgcttcgatgtaagtagcgttttcgccttccatggtaagtatatctccgttgtaatatactgtactgatagatgagggtttgacagtattatcagttttttttacttcttctctgcaagaaaccataacaatggaaaaagcaagcaataaaatcaagtttttcatgtattttttaaattaggttgcttaatttttataactggaaattttggtattatatatctgttcgataaaagtgaataaattgaaaatcagatagatttactgatatttttataggttaatatcaaaattgattctaattatgtttaaaagtaagaatttatactatatataaactgctgtgtgaacttcgcatgttcgaatcctgctctccccactaaaaaagtcctgaaacatttcaggacttttttttggcctaagaaaacatgataaaacctgcaaatcctaagactcatagttttttttcttttagacctttatacgtttcaagatgcaaaatgctccacctttactccttttaagagccgtttgctatttttttttgtgtctctcttaatttttttatgtttgcatcccaatacatttatttaagaaatgaacgaagagattaccgaatatatcaatagtgcaccagaggtgcagaaagaaatcatggaactggttcgctcactaatacatcagagtgttgatggtgtagttgacgaatacaagtggggcagacccgtttttaagtcaactaaagactttgcttacctacaaaccaacaagaatcatgtcaatcttggttttagcagaaatatcgaaaaacttaatgaccctaatggggttttggagggtaccggaaagacgatgcgccatgtcaagattaaagctgtttcggacatagatgtccaactctttagccaatggtttgtggctgtgagtgaagattaagctgttgttgtctccaacatgtaaaatgcattatttctttgactcaactgttgtttaatgtcaagccgctggttgaaacaaattatattataaaaaaaagtagccgtctcaagtttgaggcagctacttgtccataaaaacataatcttccaaataaatgtttctataaaattgtattttatttgattacgcttcttgtaaattataaagcaataatgataaattcgctgcgtctattagcctgatgctcttcttctgtacattttacaccatcagaacatccgtttatcagttgcgtttctccatatcctttaccttctaatctgttcggatttattccattttgaactaaccacttaatagtcgattttgcccttctgtcagataatccctcgttatatttgtgagtctgacggctatcggtatgggaacgtatatccagtttcatttccggatactgttttaaaacatctaaaattttctcaagatccagtactgcctccgctctgatgtctgatttatctaaggcaaagtagatcatttttatgccaaaacatttcgctaaatcatcgccaattgttaccgtacatcctaatttttcaaggataattggcaagtttgtttttcctgtttcatttgatacggtaacgcttaattccttagtcaaatatttctctttttcagccctcacatggtacgttttcaaacattcgacagagaaagtatagttaccggattcatctgaataagttgttcctactacattaaactggctatcaaataaggttaatttggtgtttggtaaaatttcgccggtgccaacatcagttattacaccatataattcctgagtacaagttaccttttttattctcaaaaattcataaatatcatcagcccccttccctccttctctattggaggagaaaaaacctctttgagatttggtgtcgattataaaagcaaaatcatcccgcactgaattgatatctgcgccaatattttgaatatcacttacaccgttttcattgatttttccactaaaaacatccaagcctccaagaccgggatgtccgtctgaagcaaaatagatttcattttcatctgtaatataagggaatgtttcttttccctccgtattgatacttttccccagatttaccggagtaccgaatcctccattactattgatactaactttgaaaatatccgattgtccaaatgttccgggcatatctgatgcaaaatataatgctttctcatccggactcaatgcgggatgtgcggtactatagtcgttactgtcgaatggaagttctgtgatatttacccaatctccattttcaaacgtggccttgtatattttaatcaaggtagtgttcgttccatctttcccttttttatcattaatgtagttgtttcgtgtaaaatacactgtttttccatcctttgtaaacactggtgtagattcgtgatacttcgaatttattttagactgaatctttttcggtttctccgctttaaaatcctgatctatatccgattcgtacagattggtaaaactttcgttggtccatttgtgcttgcgttgtcccaaactacccgtatctctggccgaagtaaaaacaatcttgttgttataaaatgcagtcccgtaatcggagtatttactatttattccgggatcgctaattttatagatgcctgtattggctttaatttcatcaatataattcttatcctcttcataaagtttacctcgtctgtcatttcctgctttttgattgaacaaatcaagcatctgattggctttgaccacatcgccggtagattttaatgattgtgcataacgatagtagtattccggttcaatttccacattcatggcaaataatttaccataccattttgcagctttttcaaattctgaattgaaatacaaggagttccccagtttcttaagcatgtcttcagagctgtatcctttttcggctaaacgttcatatgttttaatggcatcgatataagcgtaactattgtattttttatccgcagcaattactttcttctgttgcgaataagtgtttgatggcaaaaaacatagtattgtgaggcaaaagagtataaaatttttcatgttttactattttttagggtaatatttatgagtggtctctattattcaatctgacttactctctggcagtattcccggataattcattaaattttttaagcatttcattcgctttatcgttttctccaactgatcgtaatgaaagcgaaaaacgataataatattcaggctctaagtcagaagtcattttgaataaatctgcatagcttttggcggcgctatccatgtctccattaaaaaaataagcatttcctgtttttttcagcatatcgaccgatctgtaacctttattatacattctttcatatgtttttatcacatcgatataaacaaaaacatttttctttttcttaatctccgttgttgtaatagcagatgaatcttcgattacccttgatttggcagcttttaattttaaagtattattttctgcattggcaaactttggcgttatagtacgagtgttgttaggccccagattatttgtgtttattagttcaggatcagtcacatcataggttgtcttgtaactcccaaattttacattaatgatttcttcaacgtgataatatgcaacttttttcccgggataatttttgtctgtcatggccaggacattcgtttttgaatctccaattttcttttgattcaaataaagattactggcattttgcgcaaaacaattgaatgaaaacatactaactattgttgtataataaaggagtaaatgatttttcataatatcgttttaaatgaatattgcctactttttgaagtaccattaatatttaaatgctatattttttctttctgtacaacctttttaattatagtatttagaagaatctcggtgtcgttattcgatcattttttcttaaaaattcgtaacgcagaaagatttcatgtgatcctgagttgtaattgtttaaattggtggtttcgtaatcataaccatagccaatatacattccatcactaatttgaaagccaaccatggcactcattgcggcactccatctgtaagccactccggctacaaacttgtccataaacataaaattggcagaaacatctacttgcagaggagcaccttcaactactttagtcagtacggcaggtttaaactttatgtattgataatgatctaaatcaaatacataacctgccattaaataataattcattttatctttataaatcgctacatcgttatcatcatatcgattggtttcaataaatccgggaaccgataaacctacataagctttatctgaatgccagtaaacccctgctcctacatttggataaaatttattggttaagttttgaaattttggatctccctgactggcaggatgcaatcggttaacatccagattaaacaaattgcctgttcctttgataccaaacgagagcttaaaatttgctgatgtacggatcgtgtaagatatatcagttgatattgcgttttcattcgtgggaccaattttatcacttacaaaggaaactcctactcctaagttactgccatttattggtgtattaaccgaaaaactgcttgtttccggagctccgtcaagcccaatccactgggtgcggtacagtccgaaaatacttaaagctccacgggaccccacataggccggattaatacttatggtgttgtacatatattgtgtgaactgagcatcttgttgagcataaccggcaaaggatataagcgctaaaactattattttaatcttcattttcgtatattttaaattataagtagggaaagaaaattaacctgaactagttgtttaaatacaaataaccagacttatcatgcattttagaagcgttatcaacatactttagaatatagaaataagttccatccggtaatttctcatttctggaaattgttgttctgccatctgaataacctctgaaaaaattctcattagaaccataattagttgtctcaaatactttaactccccaacggttataaatttcaactgtattattctggtagcatgttaaacctttaataagaaactcatcattaattccatctgaatttggcgaaacagcgttgaaaacttcaacattacagtcttgtatggcgagaatagtaggatcattttctaagaagctgttatcatcagaaagatcactaactttagtattagaaggagttgttccctctgccatagcctgattaacaaccgatccaaaatcaatatcggcctgagtaatgcgataaacaccgctaaaatttgtagtgtttatttcgccaatccctaaattaattgggcttccggacaaaactaatcctagtaaattatccgttaccattacattggttaaaggtatgttacctgtatttttaacttcaaaactatatctaatagtttccccaacttgtacatatccgtcctgattttcatctacaaattgtgatttttttataatagcaatacccggacattcactattacttatcgtaatgggcactgcttctgattgacaacccaaagcacttcttacaatcacaagataagtccctgctgcaagtccttctttaatgttatttgcgctaaaagtattaccgttatcaaaactataagtatcgcctgcattttgaatttttatggtaatagttccacttgtgcttgtacagtttggttgtaaacgtgttatctcaaaagctcttggcgttattcttggtgtggctacacccgaaccggcaagacttgtgcaaccattaactgtagcggtaacgctatacatcccagctgtagataccgtgatacttgatgttgtcgctccattgctccataataaagaacctgaagctgtagttgacaaagtagatgtgccatcacaattatcaacaacacttaccactggcgctactggttgaaccggaacagcattgatgattaaattggttggcaacgaaacacaacccgtagtggtaatagttgtcgttacggcataggtacccggagccagattgacaaaggtagtcgtagattgcgttaccgcaggtctcaccggactggtacccgttacggtgtacgttacattggctgcaggagccggtgctgtaactactatggtacccgtaggggttaaacagtctggctgagccgttacacttgcggttggcgctactggtggaactggaacggcattgatggttaaattggttggtaacgaaacacagcctgtagtggtattagtagtcgttacggcataagtacccggggccagattggcaaaggtagtcgtagactgtgtcactgcaggagtcactggagcggtacccgttacagtataagttacattagccgcaggagccggagccgtaactacgatagttcctgttggagttaaacagtctggttgaaccgttacactcgccgttggccctgcaggattccccggaacggcattgatggttaaattcgttggcaaggatacacaacctgtagtggtgttggtggtcgttacggcataagtacccggagccagattggcaaaggtagtcgtagactgtgtcactgcaggagtcactggagcggtacccgttacagtataagttacattagccgcaggagccggagcttttatggagctagtggtcatacatattatttaagaacagtcaactccggtaattctgccacattgacgacacctgaaaatgttgctactttgagtaatataagcctgagtgccggagcccttactaccgttttttcttcgggaacgacagattatatagccaatgtacctaatgccgttagtagtataatgctaacaccagttacgaccgatacccatgcaacggtaaaagtaaatggggtagcggtgaccagtggaaatccttcgcaagtgattggtaatctggaagtaaataatgtggatgctaaggcaaatcgtattgcgatcgaagttacggctcaggatggtacggtaaaaacctacactataaaagtgttcaggcttttagcgccgccaacgattcaggccactaatcttacttttaccaagacgacaatgacgagtactacattgaaatggaccaatggaaatggggtggcaagaacggtatttatgcgtgaaggtgcaatttcgagtaatcctgtaccggataatatttattttaaagacgatcaaacctttggtaagggggatcagattggtacaacaggctggtatgccattgttaagactaatgaaggtaatgcggtagatattaatggtttgagtccgggaaagacctatcaggcaatggtgatggagtttaatggttccccaggtaatcctttatttttaaccacaaccagcaccgctaatccggcaacagtcactacactgagtaatgtcgctactttgagtaatataaacctgagcgccggagcgcttactacagttttctcatcagaagccactgattatgtagccaatgtacctaatgaggttagcagtataacggtaagaccaattaccacagatgcccatgcgacggtaaaagtaaatggagtagcagtggttagcgggagctcttcacaagtctttagtaatctggaagtggggaattttaatgccgcatctaatttgatcaggatcgaagtcaccgctcagagcggtgctgtaaaaacatataccataaatatctacagactttacccaccaccgacgattcaggccactaatcttacttttaccaagacgacagggacgagtactacattgaactggaccaatggaaatggggtggcaagagcggtatttatgtgtgaaggtgcaacttcgagtaatcctgtgccggataatatctattttaaagacaatcaaacctttggtaagggtgatcagatcggtacaacaggctggtatactattcttaagactaataacagtaataagatagagataactataacgggtctaacacctggaaagacttatcaggcaatggtgatggaggcgtatggagatgtcgattatccttcttatttaaccacaaccagtaccggtaatccggcaacagttactacattaagtaatgtcgctactttgagtaatgtaagcctgagcgccggagcgcttactacagttttttcatcagaagccactgattatgtagccaatgtacctaatgaggttagcagtataacggtaagaccaattaccacagatgcccatgcgacggtaaaagtaaatggagtagcagtggtgagtggaaatccttcgcaagtgattggtaacttgaaagagggatttaattttcaagatttgatcaccatcgaagttaccgctcagagcggtgctgtaaaaacatataccataaatatctacagactttaccagccaccgacggttcaggccagtaatcttacttttaccaatacgacagggacgagtactacattgaactggaccaatgggaatggggcggtaagaacggtatttatgcgtgaaggagcaggttccgctgccgtgccggataatatctattttaaagacgatcaaacctttggtaagggtgatcagatcggtacaacaggctggtatactatttttaagactaataacagtaataagatagagataacgggtctaaccccgggaaagacctatcaggcaatggtgatggagttgaatatagaggcttcttatccttcttatttaaccacaaccggcaccggtaatccggcaacagttaccacgctgagtaatgtcgctacattgagtaatgtaagcctgagcgccggggcacttactacggttttctccccggaaactacagtttatacggctaaagtgcctaacgaagtcagtagtataatgctaacaccagttacgaccgatagccatgcgaccataaaagtcaatggggtagccgtggccagcggaaatccttcccaaaaaatagatttggcctctggagcgggtactactgttattacaatagaagttttagctcaggatggtacagcaaaaacctatacggtaacagtcgaaaaaagtagtttaggagtagttgataataaaatggaaggttttgtagtgtatccgaatcctgtacaaaaaggaatgctttatatacaaactaaatcaactgctgtgaaaaatgtaaaaatatttgatatgtcagggaaaatggttttatctgttcaaaccacaaaagatgagatagctgttgagggattgcaaaagggagtttatgttctgaaagtcaatcaggaaggggccgaatcaaccgagaaacttgtagtggaataagattggtctgattttttagtggattcttttttgaaatataaaaagacaaagcaattccaacagactaaggtctcttttaaagaaatttagaagagatctttttctttggatccaattatttttttcttgtggttatcagatttttgcggattttttttacatcagaagcgtcacttttcggtgattttggtcagccactcaaaatagatactgttcgtctcgtcatcaggatactcatgggttttgttctcgattattctttcggttacaaagattcctttcgatttaagtttgtgtattaattcttccgctttggcaaccggtaaagcaccgtcttttcttccatgataaacaaagaccggagtttttgaaaaaggaataagaaatttatcttctaaaaaattcggatgtcctgctcccagccactcgtttgccagatcgggatgtcctgcgaaaacagctactcctttatagtattcaggatgttgatagtaggttcgcaaggctccataacctcccatagaaaatccggcaataacgattctgtttttatcacctgaaaaatagagcagtacatcttcaatggcttcaataatatcattttgcgaaccttcagaatcataacaattatacctgtctctggcaaagggagcaatctcaataaaattaccgctgcttctggcctgatttaagaccgtctgttcatcttgtccgctgccatgaagaaaaaccagtagaggatatttttttgcaggattatagtcatgcggtaattttagggtgtaaggctgaaaagtagcatcgtattttgattggaaggctcttcgatatggttttaaaattcctatgtaaggatcagtgccttttaaaaaggaattcaattccgtttcaaattggagatattctttccatacattttttccgttttcgtaggatttcaaatggttgtaatgctcttggacttcgtttgttttaaacagcagggtatttatagtgccttgctgtaaatggtatggatttctggtaatttgtgaacgaatgctgtcgaagttaaacttaggaaaaatgacaaaatcgtacgatgcaattgtatcagaggctgaacgaatgagaaaattataaggacccggttttagattatgagagtcaaagggtactaatttatgctgcagtttgttttttaaaccgacctttatttttttatcaggaaatattttggaagaatcattttggatcgtaacggcaatggttttattcagagctgtttttgctattgttattaggtttaattgcagaggttcatcagcctgcatatttcttttggccagttgagctgctataatggattgatttacctttttaggcttttcaaaaacgattggcatgaaattcctttttggaatttcttcatcccagattccttcatccttaacaaccgagtagccatttgcagcgttgtttggtatggctttcgcaaaatacagattatatcctagttgtttagaaaaccagggatggtaaggatatacgtctttccatgccaatagtacctcaaaaccgcatgtaccattatcagagatttcttgatatcgggtttcgcgacttagttttttaccatggttttggtttcggttgtagtcccagattctttttcgagcccagtattttttgtctttagaaggggagaaagcaatgtcgtagtattcgtttgtaagtgaatcattttgacgttttgcgagaagtaatttaaagccgtccccattgataaatcctctgtcgcgataagtaatactatccgttttagtttcgatatataaataaagatgtgttgcggtgtagcccaacaggtaatttactgtagtgggtgtgactgcaggattgtcaaactgaaaaaaatggttgaattccttttttttaagatttatcagtttgtcgtccagctttccgtcaataacaggagtgaaatccagaaagcgtatcgcttctgattttgaagattgtgcctgcatcagttgaaaaataaacagcaccagacagatcagtttttcttttgttttcatatcctgaaggtataattttgtattaacggtacattttataaggatttaagatagaatagattggtttgaggtttgttaaggcgttgaaaaggatgggttaagtttttgaaaatgaacactattaatggtcaaatatagtcaaaaggaaaaagtcttctgtaattagaagttggctttttaaagcaggagtattccgtttctatttttaatttcccttcggaggttaaagcctctattgagaaatagttaaaactgatttaatctgttccgttttccaacaataaaaacttatttttgtgaccattaattaataatacaatcatattatgtcagatacaatcgaaaaaattaaatgccttattattggttcaggtccggcgggttatactgctgctatttatgctgccagagcaaatatgaatccggttttatatcagggaatgcagccagggggtcaattgactacaacgaatgaagtagaaaatttcccgggttatgtggatggagttaccgggccggaaatgatgattcaattacaagaacaagcaaaacgttttggtgctgatattcgcgatggatgggctaccaaagttgatttttcgggagacattcataaagtttggattaacgatacgatcgaattgcactgtgagactgttattatttctacaggagcttcggctaaatatttaggattgccttcagagcagcattatttacaaatgggtggaggagtttctgcttgtgctgtttgtgatggattcttctaccgtaatcaggaagtggttattgtaggggctggagattcggcttgtgaagaagcacattacctttctaaactttgtaaaaaagtaacgatgttggtaagaagtgagaaattcagagcttcaaaaattatggaagagcgcgttcgtaaaactgaaaatatcgaaattttaatgaaccacgataccgttgaagttttgggagacgacagcgtagtacatgccataaaagcaaaaaacaaaacgactggtgaaatttttgacattccggcaaccggatttttcgttgccattggtcacaaacccaatacagatatttttgcagattacatcacattggatgaaaccggttatattgtaaatgttccgggaacttctaaaacaaatgtagaaggtgttttcgtagccggagatgctgccgatcacgtataccgtcaggccattactgctgcaggtacaggatgtatggctgctttggatgctgagagatatcttgcggcaaaagagtagggggaaggttctgaggggctgaggggctgaggttctgaggagctaaggctctgaggttctaagttgcagagttgcaaaggtacaaaggtacaaagttgcaaagttgcaaagttgcaaagttgcaaagttgcaaagttgcagaggttacctataaaaaaatccattcgcacagcgaatggatttttttatagtaagaatctaagaatctaagaatctaagaatctaagaatctaagaatctaagaatctaagaatctaagaatctaagagttataaattcaatttatttgagttctggtttaatctgcttattctcaattttgcttttaatatctttagcatttaatttaatcttgtttaagaagtttaaaaaaaaacttttgagaaaaactaaaatcttaaaaacttcttgactccattcaaagcacattaaaaagaaaatatttttatgtcagaaatcattaataaacattttctcgaagaatatgatttaggaactgtcatatttttaatatttaagatctaactgatgaaaaaggaaaaggatggacaaatgtgcgcccatccctgtattctgaataccgttggaaacggttttctattccaatattattttaccaaagtttccaccaaggttttgattcttcctctagttcttcaccttttccaatgtcccaaaatgattggtcgaaagattcatttataaattcttttgctaattcgtatccataaggataaatagcatcttctaaaccattttttatccttttcataactctttgtgcaggaaaacaaactgttccattggataattcaaccgaaaaattaatttctccatttacgtcactatcatccgtcacaatactagaatttggaacattttttattaatgtttgagcaacataactagatatcgaaaatacaatcgctccaaaatttttggataatctaccaccacgttttggtttgccatcgattaagtttttctgaaaaaatctgtcgatttcaataaagctataaatagagtaatccaatttatacccatcagattcaaaagcttttattacccaatctgattgctgtataatatcttctttcaatgttgccatcgttgtttcgttttaaagttttaaaatataaattatttgcatcttgataaagctaactctaatgctttagtcaattcttctttactagaatcaaaaggtaatcttacagttaaatcatcactataacctacaaatcctctttttgaacccatgttttcccatgggacaaaatttataattccatccctaacatacaaactaagattaatcgaattatcatgtaaagctttaattgttttcactcctataccttttaaatattctgaaagtctcgttttatgatcttcaagtggctgttcaccttccgtactaaactcaagagcatataaaaccttatctagtaattcatcataatttaaattgtgttctataatgtaaggagcaatagcaaatgagccactatctttaactattaagttaggatgtaaaacatatctattatcttttttaaatttttttaaaacaactgattttgtcattattttatttgataaatttaattgtaacattaatatcttgtttcaaagcatattctatagcttgattaatttgattccattgcccttctgagccctttccagtttgtactgccaattctaaagctttacttgtgtaagtttctcctttggttactgctgttcctccccatgattcacttgtaaatttagctaaatcatcgacatacccttttaaggtattcaaaacagcattacctttttgataagattttgctgttagatccatactcttaatactggttgcaactccatcaactaccttatcaattgttggaaagttctttggccataatggatttgctcctaacatatcttcaattcttcttcctctttgaagggcattcatagcccaaacactttcacctttaaaaaatgtactagctccctttaatgctaatgcacctccagcttccattgccataaattcagcaccaatacgagcgccatctgcaatcatcattcctggatcatcaaatcttgcagtatttatgtctcccttagctggtcgaatctctccactaggaatacttctcgggtctcctgacataagttttcccatggctctgtcaacatttgcttgcttttgagccatgtgactttttaattcttgaagcgtataattaccattaacacctcctgtaactcttggtccgctttgcgctgttgccaaatttccattaagatgaaaagaaagttctaatccttcaagatcagttccactacttacattattttctgcaaatgcataagttgaattgtgtgcgtacgttcctgctaaaggatctatttgccaaaatcttcctaaagctggatcataacttctgaacttaaagaagtaaaccccaagccccagctcgtcttgcaactcttttccattgtacttatacttatagtccggatgtaaatcatccgtattatatcccttgtgcttcaacccaaaaggataataattactctcttcaataatcgcaagaacttggttaaccggattcttagcataactcaacctgatgttacccaaatgatccttatactgatacacatactttttacctatgttgtcataatacccttctgctgtcgggaaaaactccaatgttggtcgcgatggggcagcctgacttgccgactgttctgcaaaggcactgaaacgattcgcttctgccggaggatctttaggaacaggctcaaaaccatgaataggatctttcggatttcccggatcatcaggtgcaggaggatctggatctccaccgcctgggtcaaccggatcaaccggaatactttggccttcgatatatctgtactgaaatcctcccagataatttgtagtggttacaacaccatctttatcttttacaaatttttccagtttttgccccgttgcgttgtaaatatactcaatagacccagttgttccaaatgtaattttcttgggtaaattgagttggttgtattgtatagcagtgatgtttttgtttttgtcggcaatcaaattgccgttaagatcgtaagtaaaatcatcccccgttttatttccgtctttaaagccatcgttgtcatttccggcaggaccgtcggttaccttaatcaaacgatttgaatttacattcaaatactcataagtcaaatcatcggtttgaaaaacaacagaaggcgcatcactggtcccataacgttgcagggatttaatatttccgtttttatcgtaactcaaactttcgttataagcgccagataccgcaatagcatcatcgggttttccatacatcgcattggttagacggttcagcttgtcatagagataaccgtaagaacgtttagaaagatcggttgcagttttccaggtggtttctgagatatttccattatacaaggcctgtacctgcgagttgcccggttgtttgtcataattgattttaaaagcaaacaaatctaacgggtctgtatcttgctgtaggttctctacattgttaattccggtaagccagcctctgatgttataactataatcaatcttctgcagagaattcccaatatttttagtaatcaattgccccagatcatcataagtattgttcgccaaaacttcaacggttcctccgttgatttgatgggtatgggttagtaaacggtcttgtggcgaataggtgtattcttcctttatcgttagctctgtgtctcccgaagtacgtttgtgtttggtgacggtatagagtgactttccagtaaaatcaagtttactgttggtattggtataacctcccaaatgattttgagtccgggttctcaccgcacgtgatctggtatcgtaaaaagtggtagtggtttctcccaatgcagctgaggcagtagtcagagctcttgcccagctcccggtcaccaaacctttggcattgtctaaaacggtctgcccttcaacggcagcaggtcggatttctgcattgggaaaagcataatcatcgtaataagtaacggttaaaagtttaaaattggtcggagcaatgtcattactgtaatataccgaaatatcatctatggttcctgaggactttttcgtttcaaacaaaacagtagccgtattttgggcatcctgtaatgcttttctggtgaccgcattggaagactgactgctccaacccgtataaacaggtctgccaaaagcatcgtatttggtaatgatccagccttcggcagtttcgtctttaaagggcgaaaaagccggtcccgtcgcgacggggcgatcgagtttgtcgtacacaataaattcccattgttttccgggtagttttttctcgaccagacgattgcggtagtcgtatttgtattggtagcacaaaccgtttaaaatctcgtcactgactgcccccgatacttttgggggcaatacataagtcaggttgccataaatattgtaaacgtagtacgtatcgtgtcggttgcctgaattgtaagttcttttgaggataactttaccttctttgtttttaaattctactgtagcaccggcactttcacttggggttgctgttgtattctcatcataagttaccgttttgtagagtgtcccgtctgcataagttcccggctctgtaagactaatattgtacagtcctaagtctgcttcccagctggtattggctttgtatcgttttacggtatcagcagcggtattagcctgataatcgattttaatctcgtggcctttgcccatttcccaggaagctccgggcgcagcttgcttgagcacgcggttcagaggcgatggttcaaaggctttctcggagaaaggatttggggtattgtcatattttgcagcgctataaatgccttttgcggcagctatggccgtattggggtctattctgggatagctgctgcctccattggcagccgggtatggcaggtattctttggcttgtcggccaaagccgtcatattctataggagttataatgtcttgtccggctgctccctgaccaattgcaatggtttgtatcgggcgccccagtccgtcaaaataggtcacattctgactcatctcgtctttggtcagcgtatgtagatttgctgccttcaccgctttttttggggtaagcgtgtatacaaagttatcatcgctgaaggtttgggcagttaagccaaagcttgctattaataataaaacaaactgtactatatatttttgcatagaagtgcttttttaatgttctttttttataaagacaatttgttattgatttgtacttgtatatttaccatgtgcatcggcataagcctgcccgtcagcctgtgctttattgtcagcatctgctcgtgggaataggcaaaaaaagatgaagtaaagagaagcagtattaggtagagttttttcataagtagcctttggttttggcaattaaattttgcctccaaaactaatcgactgattcataatatctttacggctttccacattccttagtctttctaaaagaaacaggtatttgcacgtaatattttacttataaaaaacattgatatttaacttgataaaatcgcagtatttctcttcttattaaattaaaatacttaaaatcagtattttaacacatttttttttgtgtaatactataaaccataaaaaccttttattgatttaaaatattaattgaggtttctttatttcatcttacccagataaacctcttacttataactcaaaatctgtaatccagtaaatttctaagtgtggaattgatctcttttaccataaaatttaaggctgtcttcttcaaacattttgaaaatattagaactaaacaacttgcgatcaaataattttatacaacaacccggatgtgatttaccaaagagtagatttatgcccagtattagatgttttgattcgcagaaacatgacatcaatcgaaaaggaaattgaagagtttgtaattagccagttctgtactcttgaattgaatgaattgtattacacttacaaagatttacacgaacaattaaacctagccaatataagaagggacataagtatataccatatttctatttacaaccgatacaataaaaactgatttgcaaatgttttgtcacaggttttgaaacactgcattaagaatttcaaacagataatagaaataagaattttttttataaaaaagaaagatgtttatgtgcttcaatgactaatataatttttatttaagggttaatatagaaccaccggattgggtaattataaaccttccaaatactggaaggtttttttttgaattaaaattaaaaaaataacacaataatggaattaaataagtacagcaaaaccatcactcaagatcaaacacaaccagcagcgcaagccatgttgtacggtattggtttaactgaagaagatttgaaaaaagcacaggtaggtattgtgagcatggggtacgatggtaacacttgcaacatgcacctgaatgatttagcaaaagacgttaaaaaaggagtgtgggatgcaaatctggtcggacttatttttaataccattggtgtaagtgacggaatttcaaacggtacagaaggaatgcgttattccttagtttccagagatgtcattgccgattctatcgaaacagttgcgggagcgcagtggtacgacagcatcattgcaattccgggttgtgataaaaacatgcctggtgctctgatcgccatgggacgtttgaaccgcccgtctttaatggtgtacggaggatctattcattccggaaaatggaaaggagaaacactgaatattgtttcagcttttgaagccttaggaaaaaaagtaaaaaatgaaattactccggaggattttaaaggagttattcaaaatgcctgtcccggagcaggtgcctgtggcggaatgtataccgctaacaccatgtcttcggcaattgaagccctgggaatgagtttgccatacagttcatcaaatcccgctttaagtcaggagaaaagagacgaatgtcttgctgcaggtaaagctattagaacattattggaaaaagatattaagcctagagacattatgactcgtaaagcttttgaaaatgccattacaatcgtagccgttttaggaggttcaaccaatgctgtaatgcatttgatcgctatggcacattccgttggtattgaaattacacttgatgattttcaagcgattaatgacagaactcctgtactcgcagatatgaaaccaagtggcaagtatatgatggaagacattcatgaagcaggtggtattccgtcagtaatgaaatacttattgaaagtaggactaattcatggagattgtttaactgtaaccggaaaaacagtagccgaaaatttagcttcaactccggatttacaagacggacaacaagtaattcacgaaatacaaaaagctttaaaaccaaccggaaacattcaggttttatatggaaatctggcttctgaaggagctgttgccaaaatcagcggaaaagaaggtgagtattttgaaggtcctgcggttgtttttgaaggtgagtttgaagtgattcctggccttgaagccggaaaaattaaacccggtaatgtagtcgtcatcaggtattgtggaccaaaaggtggtccgggaatgcctgagatgctaaaacctacgtcggccattattggagcaggattaggaagcagctgtgctcttattacagacggcaggttttccggaggttcacatggctttgtggtaggacacattacaccagaggcttatgatggtggcggtattgcactggtaaaagatggcgatttaattgctattgatgcagtaaaaaatacaatcgacctgaaaatatctgacgaagaattcgcagcacgtaaagaaagttggattcagcctcctctaaaagtaagcagaggagttttactgaaatatgccagatcagtctcaagcgcttcaactggttgcgttaccgataaataattttacaataataatttcaaaaaacaatgacaatatcaataaaataacaaagttcaattgcaataaaaagtagaagtataaagaatcagtttgaaattgattttaacattgccattgatttttgaaattgatttttgacattgaaaaaacaatatactatgaaaatatcaggggcagaagccgttataagatgtttgttagcagaaggagtagacttactttatggttatccgggaggagcaatcatgccggtttacgatgaattatataaatttcaggatcagttacaccacgtgttggtacgtcacgagcaaggtgctacacatgccgcacaaggatatgcccgagctacaggaaaagtaggggtagccattgcaacttcagggccgggagcaaccaatttaataaccggaattgcagatgctcaaatcgattcaaccccaatggtttgtatcacaggtcaggtagggaagcacttgttaggatctgatgcttttcaagaaacggatatcattggaatttcgactccggtaaccaaatggaattatcaggtaaccgaagcttcggaaatccctgaaattattgcaaaagcattttacatcgcacgttccggacgcccgggacctgtattaattgacattacgaaaaatgctcagtttgaccaattagattttagttatgaaaaatgtaccggaatcagaagttatactccggttccgaaactaaaattagataaagtcgccgaagctgctgctttaatcaatagcgctaaaaagccttttattgtttttggacaggggattattttgggaaaagcggaagccgaatttaaagctttacttgaaaaatcaggaattccagctgcctggaccattttaggactatcagccttgccaacagaccatcccttaaacgtgggaatgctgggaatgcacgggaactatggtccaaatttgctaaccaacgaatgtgatgttttaattgctttcggaatgcgttttgacgaccgtgttaccggaaacctgaatacttatgccaaacaggcaaaagtaattcacttcgaaattgatcctgccgaaatcgataaaaatgtaaaaacagaaatagctgttcttggagatgtaaaagaagccttaaccgctttattaccattaatcgaagcaaaatcacatgatttatggcataacaaatttaaagagctaaaggaaatcgagtacgattccgttataaaagaagaattaaacccaaccaataataaaggaatttcaatgggagaaaccatagaaatgataaacaaacactcaaaaggtgatgctattatcgtctctgatgttgggcagcatcaaatgtttgcctgccgttatgcaaaattcaattctaccaaaagtaacattacctcaggtggattgggaacgatgggatttgctttaccggcagccatcggagctaaaatgggaaaaccggatcgtgaagtagtggctataattggtgatggcggttttcaaatgaacatacaagaattggggaccatttttcagactaaagtacctgtaaagattgttatcctaaacaacgaatttttgggaatggtacgtcaatggcaggagctgttttttgataacagatatgcttctactaaaatgatcaatccaaattttgttgcgatagccgaaggatattatattaaatctaaaaaagtaacacaaagagaagatttagatgcagccgttgccgaaatgctggcttcaaaagattcctatttcttagaagttatggtagagaaagaaaataacgtattcccaatgattccaacgggtgcatgtgtttctgaaattagattaagctaaaattaaagtttcatgtttcaatttttttgagtttcaagttgtaaaacctgaaacctgaaacttgaaacaaataaaactaaaaaaaaatggaaaacagaacatttaccatatcggtatactcagaaaataatgtaggattgttaaacaggatatcaggaatattcttaaagcgtcacattaacatattaagcttaaacgtttctgaatcagaaatagaaagtgtttccagattcattattgttgtggaaacaacagagaaatgggttaaaaatattgtcggacaaatcgaaaagcaaattgaagtgataaaagcattttatcacacagatgaagaaaccatttatctggaaaacgctttatttaaaattgcatcaagcctgttgtttgatgaaaaacaaattcagaacatcatcaaggacagtcagtctacaattgtcacggtttcccgcgatttctttgtgatttccaaatcggggagacgttcagaaatcgaagatttgtataccaaattcaaaccttatggcattatgcagtttgttcgctcaggaaggatatctgtttcaaaagaaaaaatggaaatttcaacaatgttagaaacattcaaatagtattatttcatctattaaccaattattaaatacaacattcattaaatatttttaaaaaaaatggcaaattatttcaacacattaccacttagattacaattagaacaattaggcgtttgcgaatttatggagcaatcagaatttgcagacggaatttcggctctggcaggaaaaaaggttgtcattgtaggctgtggagcacaaggtctgaatcagggtttaaacatgagagattccggtttagacatttcatacgcgttgcgtgcagatgcaattgcagagaaaagagcatcttataaaaatgccactgaaaacggatttaaagtaggtacttatgaagaattaattccaactgccgacttagtttgtaacttaactcctgacaaacaacatactgctgtagttaccgccataatgcctttaatgaaaaacggagctacattatcatattctcacggatttaatattgtggaagaaggaatgcaaatccgtaaagacatcactgtaattatgtgcgcgccaaaatgtcctggttctgaggttcgtgaagaatacaaaagaggatttggtgttcctacactaatcgctgttcacccggagaatgatccaaacaattttggtttagatcaggctaaagcttatgctgtagccaccggaggccataaagcaggagttctgaaatcgtcattcgtagccgaagtaaaatcagatttaatgggagaacaaaccattctttgcgggttattacaaaccggttctattttatgtttcgataaaatggtggaaaaaggaatcgacaaagcctatgcttcaaaattgattcaatatggatgggagaccattactgaagccttaaaacatggaggtatcaccaatatgatggatcgtctttccaacccagcaaaaattgaggcttacgaaattgctgaagaattaaaagacattatgaggccgttattccaaaagcaccaggatgacattatctcaggagaattctccagaaccatgatgatcgactgggcaaatgatgatgtaaacttactaaaatggagagctgcaacaggagaaactaatttcgaaaaaacagctccacaagaagctccaatttcagagcaggaatattttgataacggagtactgatgatcgcaatggtaaaagcgggggtagaattggctttcgaaaccatgactgaggctggaattatcgaagaatcagcttattatgaatcattacacgaattacctttgattgcaaacacaattgcaagaaaaaaattatttgaaatgaaccgtgtgatctcggatactgctgaatatggctgttatttattcgaccatgcctgcaagccgttgttaacagaatttatgaaaacagtggaaacaaatgtaataggtaaaccattttctacttcaaatggagttgacaatgctactttaattgctgtaaacaaagaagttcgtcaacaccctatcgaagaagtaggagcatggttgagagaatcaatgacagcaatgaaaaaaattggataataaattgggaattaccacacatacggttgtggaatctgctctgtatctccgtttgatgtaatatttttgaattagtaagcacttattaagaaaaatggatatagatgcaaattgcattcacttaacttctgaaagtaagactgtaagttaagtgaagctaatccctaatgaagggggtatatttagtaataaatgtacttgttgaagtttcattttaattaataaagttgcttctattttcaaaaatagtgcggaagattgtaatacgtttggtactgtttctttcgatgaaaggacattttgtacagttatatcgttttcttctataagacgatatccctatatttacaaaaacaataatgtaaaataagagtgattgaaagaaacttctaataaatatttgatagtagccttactttttggattgactttccatggcagcgctattttttttactttagaaagttcttatgatgctttaattcacatgtttttcggaaatcattatgcccacagttggtttgaaccttggaattatagttggtatacgggttttaatgtgatgagttatcctccattagtgcaccaaaccattgggttactttctttaattggaggtttgaaatttggtatgtttactgttgccatcgttgggattattttattcattacaggaacttttagattttcacttttaataactggaaatagaaccgttgcaggttattctgctattctggcagtggtttcttcttcttttgtagaaacattgcatatttttggacagcttcccagtattattggagtttctgttttaatgcatgcacttccagagatttatctttttatcaaaacaggcaaaaagaaatattacttcacctctctgtctttgatggccgtaaccgtttgttcgcatcatgttacacctttatttggaatggtattttttgtttcgcctttaatcggtatgatagtaatggataccgctcgcgaaaatgtcaattcattcaaggaaatcacattcaaaatattctataaaacatttctatcattattaaaacggattattcttttctgtggtagcgccgtttttctgctagtattttgtatactgccgtattggattaattctaaagccaatcccatcactcaggttcctattccgcatggaagtcgcgacaattttatagaagtaacctcttctggcttgatgttcttcttgataccttggggaatattactttttatattgccttatatattttatagatattacagcaaaaggtatatttttttcggattatccttaaccttgctcactgttttaggaacgggcggcacaactccaattcccttagcgattttaggagaaaatgcttttaatatcctaaccttggatcgctttacactttgggcttctataatgagtttgcccatttttggtgaatttgtgtaccgattagttgaaggtgacttaagaacggctttgcaagtaaaatttgggagtgtttataggaggatcctaggcggattatttgctggttgctttttgttttttgcagtgtttaccatgacgttagggtattttagaccattgcaaccgcaaaaaattaactttttaccaattgtcaatttcttaaatcaggatcaacacgatcactggaggtttttgccattaggttttggtgatcagatggcctacttatcgacacaaacaaatgcaatgacggttgatggaaattaccattcggcaagaagattaccagaattgacttctcgtgcagtagaacggctggaaaactccaaatttcgaggacttgaaggtattggttcattgcagcaatttctaacggttcctgaaaaatataatttgaaatatgttttttctaacgataaattttacgatccaattctctatttctgcggttggcatcgattatcacaattagaaaatggtataatggtgtgggaaaaactaaatgtgcagcccttgtctaaaattcttccaaaagatgaagtaccgatctatttgaaattaatgtggggaattattccgatgttaaccattcttctggcttttatacttaatgttcagatgatttggttgcaggccttaaaaataaagcctttagaaaaaccttctttcaataagtatggaattgtttatgctaattttccaagagcgatgataaaatttctacacatttggacagggattttactactaattataagctttggagcatatcgcatttatatcaaaaatgctgcacagattagtcctgaaaatgttgtaaaagcatattatgatgctctagattttaagttttatgataaagcgcactcttatgttgttcctaataaagaatactcggtggctcagtttatgctggaaatttctgtttcggatggtgttcttaattcttacgccaagttagatgctatcgaaactaaaattgttcagcaaagtaaagacaaagctagagttattgcaacgaccaagtgggttacaccattagaattaattgaaaaaaagtacatacatgacgttcagaaaataaacgggaaatggtttatcattccagataaaaaagataccgatattcctccggacgaattcatgtcagagaatattaattcgtattacaagcaagggagacgaaagacaactacccagcagacctatcatgaagatgtactgcgccaaccagatttagaaattatatcggcaagtttggtaaaaattgacagtcaatatatagtgattggtgaagttcaaaatatagataatgttcctgcagatgtggtcttgaaagctactttatatgacagaaatgataaatcgattgccgtattcaacgcaaagtatactattaaacataaattgatgccaaaagaagtcacgagttttaaggtgaattttgaagatattgcgtggttaaagccaactgatgtaaagccaacaacttttaaccccaatgaatttacaccaaaagaattgaaaaatattcccgctacatttgatattcaaagtgctggaaatgtcgcaaccaccgacttgtataattcggttgctatttcagatttagtgatagataacaaccagatcaaaggtactttattcaattacggaattcaagaagtaaccattccagagctcttaatttcgtattacaatgataaaaaagaattggtttatgttgatcaccagtttataaaagagggtgttcgcattcagcgtaagcaatattttacctataatttgccaagagatttgaatcctgtgattataaaatcttcaacagaaaattgttttgtaaatggtttagaatcagaagctcttgctcgtgcggtaattccggtacgaaacagtaaacaagaaagtgcacaaatgcaaagggttaaaggacataaagggtattcgtttattaaaattgaaattaataattacattggaaatcctagataatgaagaataaaatctatatattttgtttttgtttgtttaccatattattggtatcagtcactttattgcctaaaaaacaaacgggcgctattatactaattacgcaacaaaagacttttatagcaggtgccaaaatagctttagattttgaggtcaatacgtcaaatagaccgcagttgtttttaattcattctttaggaaaaacacttttagatgccaccgttaaaaatgataaattaacttttgccctccctaaaagttatgctaaaaaatcgggtcgtattgattggtttttggttgtaaacggagaaaataaactacagggaaactttgaaattttgcccaataacgacactaaaacggatatcgaaaattatttaggtccaccaagtacattggtaggtgatggtcattttgtaatgtacgttaccattccgacagatggctttgataatccgaaaccagaaaatactcctgtaatttttagaagtcagtttttaaatactattacaaatcaaacggtaaaaacgaaaaatctcattgcttggaaaataattgatgctcctacaaaatctggaatagttttggtttctgctcaatgcaatgctaccattactaaagaatttaacgctgtaatttttcctggaatcgctacaaatttcataatttcttttactagaaatcatcaatatgctgatggaaatcaaattacgaccttaaaaacagctgttattaaagacaaatttggtaacgttgtaagcgacggaaccatggtctcatttgtgatttctactgctaataatatggttttaaaatcatttggcacaactataaacggagttgcaactgctcagattttgcatcctgatcaccaagatgtttatactgcaaaagcgtatgtagcgggaatagcagaaagtaattctatagcaattaactacgaaccgattaatccgaaaattgaatttgaattttcaaaagataagcgcactataatagtcggcccgttgcgtagttttataaatcagttagttccagacggaattaaagtgactctaaaagtgtatcatcataatcaactcgtagcaactttgcaagaagatagcgtaaaaggccatgctgtttttactatttcatctgaatattataaagaaaaaaaatattcatttgaaatttcaaccttaggaagtattcaaaaagtagaagaaaaaaattatgatagtaattaacaataaaaataattatcgggcaattttaatagtttcatttattgcgattaatattttggtattatttggaatgagtgaaattttgggctacttaaattcgggagcagatagaagttcgatgctgcatttagagaaagagactttagatacatatttacccaaagtaacgtgggaaaccttcaaaaatcaaggtagacggatggaaaatcaaaccatccagaaaattgagaagcattatttgttttcttatgtaataaaaaataatgctcttaaaaacaatgtcaatgatggaattgacgattattttacagaaagttcgagaaagcaattagaacaaattatagcctataataaggccaaaaaaatttcgatccagagtacaataatagaacatcatgcatcgttagatttttatagcgaagacggccaacaagtcgttattaccgataaaaatgtagttgaatttcaaaatgtttatcaagataacaagcttataacttctgttcgggatactgcaaattataaggttttaatgttgctagaggatggtttttggcgtattcgacactatgttcggatgcaaaaagaaaagagtttggttgctgtagaattgaataaaaaaatatacacggtaaaaggaaatgaaattttaaaaaatggtgctccctatatcataaaaggtattaattattatcctaaaaattctgcttgggatatgtttggaaataaatttaataaagatactatagctgctgattttgatataataacaaaagcaaaactcaatacgattaggatttttgttccttatgaagaatttggtaaagcagaggtttcaaaagagaaattagataaggtaaaaatagttttagacttggccgaagaaaaaaaactagctgtaatcgttacattattcgatttttatggagattatgctccagaaagctggactttaactcatcgacatgcagagaaaattgtaacgacttttaaggactgcaaaaatattattgcttgggatattaaaaacgaacctgatttagattttgaatcacgtggggaacaaaatgtaaagccttggttggaacaaatgattgcagcagtcaagaaattcgatgctaatcatttggtcactattggatattctaatattgcatcggcagagatactaaaagataaggtagattttgtatcgtatcattattatgaagatatttcactttttgaagagaaacttgctgttttagaaaaagcagccaaaaagcctttggtaatgcaagaatttgggctttcgtccaatcgaggactgtggagttggtttggtaattcaaaagaaaagcaggctaattatcataaaaaaatgcaatctatattcaaaaagaagcaacttgcatttgtttcctggactttatatgattttccgaaagttccagataaagttgctggaaaatggccgtggataaaaaacaaacaaaaacagtttggattcatcgattcagaaggaaaaaacaaaccttcttttttgtatataaattattgattttaatttttaaataaaaaatatagcataaagataacatttgggttaaagttagatttggaaagttaattcatataataagtggaatatcttgatttaaatcataaaaaattaagatttaaattatgtgtgttgtaaataattaacaaaataacaaaactaaaccaaaacaagtattatgaaaaaacaactacttttattagtattgtgttgtctctggagtatgcagggaattaaagcacaggatctaattgaggcttcacacagctgtcgcacaaaagaggtcaatgaattacaattaaagaaccaccccggttcattgaaagaaagtaaagcgtttaatttttttagtaaagaatacgctaaaaagctgaagaccaataaaagtgcggtgaatactacttataccataccagttgtttttcatgtgtatggtacatcgtttaatggtaaaacagttactcttgagaaaatacaaacagccttaaggcatcttaatgaggattttcaagggttgaatgatgatttcaataccgtagagcctttttttcaggcaagaaggggaaccttaaatattgagtttaaactcgcacagattgatcccaatggaaaatgcaccaccggagtaatttttgaaagaaaaaaagacggatatggtaacgggggtgggtacgatagccaaattcaggcagatgcctgggacaattacaagtacatgaacgtttacattcagaatgatttgtatgccgatggtgctaccaataattcaggagtttgctggtatccggattcctggatgtccgataataatttggcaagatgcgtttataacggagcttatctgggagaaaataccaataaagaatttgcgtcggtattgactcacgagtttgggcatttcctgaatttgatccatacttttgatggtggctgtacagggactgatcaagtagatgatactccaaaagaagacggaaaacattctttgggctgtgtacccggaacgaattgcgacggtgacaaagtaaatatagagaattatatggggtacaatgctgcacaaggatgcagtaagatgtttacacaaggacaggtagcgagaatgcttgctgctttacagcactctgcaagaaaaacattatggtcagcacaaaatttgatcgatacaggtgttaattcaaccggaagcagtgtaaccacaaatgttacaagttttaaagaagatattgcgaataacggaacagttacgggcaatgctgtaattactttaaatggaactgtcttttcgaaatcgtcgggagctttaacttcaggggtagattttagttctaatttgcctgctggtttaagtgctgcgattgttatcaatagcagtaatcaggctaccgttactataagcggaacggcaacgaatcataaggcaagtaatactgccagcggtggaattacattgttagcttctgcattaaatggtggagtgagcggtatgctttgtgatggtttgagttggaattttaaatttagagatccttatggtattttctatgttgatttgcctgatatgacggttacacctacttctacctggaaagcttttttggttgaaaaaggagacgatgtaaagtatggtgcctggcgatttgcagccaatcatttaaaagtggaaacttatggaaaaagactggtaaccaatgcaggaacaaataatattacacctcttggttttaatacagcaattaatgcaagcagtaattttacagcaccgggagcctatccaaatcaattggatataagaacgccgtcttatactgcttgggacggaaaaacggattatttaggtttcgaatacaccattgatggagaaaaatgttacggttggttaaaagctgttgttaaggcagatggttcgggatacagtattctggagtatgcatataatacacaaccgggaggaacaatctacaccggaatgtccgataaagtggcgttaagtgtttctccggcttctcttgcggagagtgctgctaataatggaagcatttctcagatttcttcttttaaattaacgacgaacaatggaacttttgttaaaaattcaggagtactgactcccggagttgattatacgatcacgggtgttccggctggtttgacggctaaactaaatgtaatgagtactaccgaagtgcaattggctttaacaggaaatgctgcggtgcatttgaaagaaaatagtactcaggtagtagtgacctttttaaatcctgctattacaggcggagttgcagtattgtcaaattctgttgcagctgttaaaattaatttcagagatccttatgcaattgtacatgtgaaagatctgaattataccgtggatgcagaaaatacctggaaattcttcagaattacagctgatgccgatcagcaggattatggagtttttgtggataagggtgatcttaaattagaaacctatacaaaatctattgtttgtgagggtaattctttaaatatgagtttgatcggagccaatcaacttattgatggcaacagtaattttattgaaggaggcagttatcctgatctgcacaatttaagaaatgcgggttataaatcatgggatgggaagacgggctatattggttttaaatttacaatagctgatgaaccctgttatggctggtttaaggtgaaagtaaatgccaagggaactgcttatacattattagaatatgcttataatacagaacctctggcaggtatacttactgaagatattccggcagatctcaccgttcatttagctactacaccggatgaaatcaatgaaaatgctgtaactaatgacggaagttttgagacaaaaatcgcaattcagttaacaacaaacggcgggacttttacaaaaagctctggaaatttagtccagggaacagattttaccgttgcaggactgccagcaggtttgactcctgaaattactttaataaacagtacaacagctgagttaagttatacgggtaaagcaacggccaatgaagcttcaaatacagccacggcgactgttactttcctgaaccctgcaattaccggaggagctgcgattcttgatacggattattttactactaagtttatttttaagaacgcgtataaaattatttacgtcgatcttccaactcccttaacagtagctgtcacaggttctaaatggaatccattcaatattacggcagatgcagatcataccggctatgggttatttattgacggcaatgatttaaagttggaaaattatgataaggatttggtttgcgaatcaggaattaacaatatctcgtatttaggctataacgttacaattggtgcagctagcaattggaatgggacaagagttcctgctttaagaagcagtacctatacggtttgggacggtaaaacaggttttataggttttaaatatacgaagaatggagtgccttattatggttattttgaaacggttgtaagtgccgatggccagagttatacgatcagcaaatatgcttataatacagctcctgcagcttcaattactacgcctctccagttaggtgtggttaaaatgagtaacaatccgacaacaatcactgaagataaattaacaaataacggaacttttacaacgacagtaacggtacagttgacatcaaatggcgggacttttacaaaaagttcaggcaacttagttcaggggactgattttactatagcaggtttgtcagcgggtttaacggctagtgtgagtgtcgtaaataacactacggttcaggtaagttatcaaggcaaagccattgctaatgaggcagcccatgcagctacagccacaattacctttttagatccggctattaccgggggaacagcagttttagaaaataaatcgttcactactgattttacttttaccaatgcttatgtggtggttaaagtagatttaccgactccgatagtagtttcggctgcgagtccttcaggatcttttagaattactgccgaggtagatggaaacgagaccgaatttaaattgctttatggtgttaatggtcttaaattttcaacgaataatggattagttactgaaacaggaacagctaacattggttacatcggaaccagtcaaatgattggaggaagcaaccatttaaattcatccggtgatgccattatgagcgatcctgtttatagcagctggaatggaaaaacgggattcattggattttcatttgctaaaggcggggcagtttattacggttattttgaaggggcagtaagtgcagacgggaaaagttttgcgataatacgatatgcatacagtaccgaaccgcaagcttcagttaaaactccggacaccgttcaaaatttcactttccctactttgagtactgtagattttgaaagcaaagcagcttttaaaacttatccaaatccgtttaacgatgtcataaacattagttctgattcattttcggggaaaaaaatagaggtgctaatttataacagtttaggacagaacatgtttgttaaatcatacgatgccaatgatggcactataactgtagatggcagtaaccttaccaacggtttctactttttgaaggtaaaagtagatggcaaggagcaggctgttaaaaagctaattaaatagtagacttaaaatagaaattgattgaatagaaggctgtctgaaaggacagccttctttgttttgtctctttaaataaaaaagaagatactgaccacgttacaataatcccagcgttttagctttttcaattagatctttgtcgcttccttttccttttaataactgatcttttatgttggctttccttttttctatagcgctcattgaaagagggatatattcgggaagatttactgtttttaccccctcagagattagaattaaaatttgattgtcgtgattgtcccaatttatatttttcttaaacagttctctttgagattctacaatggtatcgcttctgaatatttcgccattaataatgtttttacaaattacgggaaattgttcaaaattgatgtcacttttggatataaaaccttcaggctggattccttttattattttgtccaccgtcaaaggttcactgcgcatagtaaggagtactattttgcaattcgggaatttttccttgatcaaataggccaaatctatgccgtcattaatatttgatggtttgtagggcggcagattaatatcaagtaaggcaaaatcgatagtactattttgcttgtgatgaagaatgattttattgtaagcatcttcacaattatgacttttaataaaatttggtaaatttttctgaaactcaccatcagataagagattgatatagctgtccaccgtcattggatggtcgtcgacgatcaaaatattaagattcataatttgtttaattctattggaaacaaatgtaagaaaaactacggtttttccgtaatggaattttgattgttttacaactaaagagattcgttgaatggttgataattagtttaagttctaattttaacatgaattaaatgaaatattacggatttaccgtacattttaatccggagtttagtgtttttttgttttaataatcaattaaagttatttttatgaaaacgaagttatttattccgggattgctaattgctgttgcactgttgactttttcatgtacaaatgatgattatgaaactccgaaaactcagagtagtcaatcaaaaaatttgcatgaaaaattagatccaaaaacaaataatatggttaatggaacgactaattcggatactgacttgttaaatactgagggtgatcccgaaattacaagaccaaccagaaaagactaaatgtttttgtgtttataaaaaagactatttgatttatttttaaatcttatagtctttttatttcaaaaccctatatttgaaattaaataaattagtacagcaaaatatttacaatgtaaagtataattaaaataccccatttataggtatatgtttgagaaatttggtaggtttggaagaaattaaatttttatttaaatatgacaaataaaaaggaacttagcgaaatcgacatttgtgatttatacattacgccagctattaaaaatgcgggatgggatccaatcaaacaaataagacgagaagtgactttaactcctggtcctgtaatagttagaggtgagatgtcggctaggaataaaaagaaaaaaaagtttgctgattatgttctttcatgggaaccaggtactagaatagctgtaatagaagccaaagataatagttgttcagttagccatggcatgcaacaagctttaggctacgctgatattttaggtttgccaagtgcatttagttcaaatggcgatgcttttgcctcacacgataaaactacaaaagaaggagaagacattgaaacagaatttcctcttgaaaactttccaacacctgaagaactttggaaacgttacaaaaaataccacaatatagaagacagtcaacaagaactaattttgcaaccatattatactgatggttctggcaaagagccaagatattatcaagtcgaagcaattaatcgtactattgaagctgttgcaaaaggtcaaaatagaattcttttagtgatggctactggtactggaaaaacatatactacatttcaaatcatttggcgattgtggaaagctagagtagcaaaaagaattttatttcttgtagatagaaatattttagctgatcaaactcttgttaatgattttaaaccgtttggttcggtaatgacaaaaatcaagaatcgaaaaattgacccttcatatgaaattcatttgggtttataccaagcattgacaggaccagatgaatctgacaaaatatttaaaagtgtctctccagatttttttgatttaatagttattgatgagtgtcatagaggtagtgcagcagatgattcttcttggcgtgaaattttagactattttaaaaatgctgtacaaataggtttaacagcaacaccgaaagaaacggaatatgtttcaaacctaacttacttcaaagaacctgtatattcctatagtttaaaacaaggaattcaagatggttttcttgctccatataaagttgtaaaaattgatatagataaagacatcaatggctggacaccgcctgatgatatgactgatgatttaggtaatgcatttgaaaagcgtacttataatcaatctgacatggatagaattctagtattaaatcaacgtacaaaattggtagcgaatagagtaatccaattacttaatgctactgacccaatgtcaaaaacaattattttttgtgaggatattgatcatgcggaacgcatgagaaaagcgattgtcaatgctgctggtaaaatagctattgacaatcctaaatatgtaatgcgtataactggtgatagtattgaaggaaaagcagaacttgataattttattgaccctgatagcaagtttcctgttatagctacaacttctgatttaatgacaactggtgtagatgctaaaacatgtcgattaattattttagacaaaacaattaaatcaatgacaacctttaaacaaataataggcagaggtacacgaatagacgaagagaataacaaattcttttttacaataatggattttaagaaagctacagaacattttaaagacgcagattttgatggtgagccagtagtaatttataatccgggaccagatgatagtcctgtgcctcctgatcctgaggatggtggtgatgacgacactggtggtgacgacactggtggtgatactggtggttcaggcagaataaaaattataatcagcggtgttcctgctaaaattataaatgaaagaattgagtatcttggtgatgatggacagttagtaacagaatcgtacaaagattttactcaaaagcaagtaatatcagaatatgcttctctagatgattttttacaaaattggaacgatgctaaaaagaaacaagccattattgagttgcttgaagaacatggcgtagtacttgaaaatttagccgaattggtaggaaaagaatatagtgattttgatttgatatgccatgtcgcatttggtcaggcaccattgacaagaaaagaacgagcagaaaatgttaagaaaagagattatttcacaaaatatggtgaacaagctaaagctgttttacaaggtttacttgagatgtattctgataaaggggtagttagtattgaaaacgtgaaggttttaaagcttaaaccttttagcgattatggaactccaatggaaattataaatgatttttttggaggaaaagaaaaatacgaaacagcaatagaagaattagaaaaagaattatttaaacaagacagaatagcatgagtaatgtatcaggtatcataaaatccattcaggatattatgcgaaaggatgtaggagttgatggagacgcacaaagaataagccagctagtttggcttttcttcttaaaaatagtagatgaccgtgaggatgagttagaattaacagaggatgactataaatcaccattaccggaaaaactacgatggagaaattgggctaaagatcctgagggagatacaggagatacgttactcgattttgtaaatcttgaacttttcccaacgttaaaaacaaaattaaaaatagagggtgatgatggtggaagagctttagtaataaaaaatgtatttgaagatgcctacaattacatgaaatctggtacacttcttcgacaagtagtgaataaaatatgtgaaattaatttcaatgcttctggtgaccgccacacgtttggggggatttatgagcaaatacttaaagatttgcaaagtgccggaaacgctggagagttttatactcctcgagccgtaactactttcattgttaacagaatagcgccaaaattagaagaatccgttcttgacccagcctgtggaactggtgggtttcttaccaatataattgaatacaaacgagacaactttgtaaaatctcctgctgatgaagaggttttagttaaatcaattcatggggttgaaaagaaagcactacctcatttactatgcactaccaatatgattttgcacggtattgatgtaccaataaatattaaacacgataatactcttgccagaccattacgtgattatacaaacagtgacagagtaaatgtaattgttactaatccgccttttggtggtatggaagaagatggtattgaaaataactttcctgccaacttaaggactagagaaacagcaaatctttttatggctcttattattcatttgcttaaaaatgaaggaagagctgctgtcgttttacctgatggttttttgtttggtgaaggtattcaaactagacttaaagaaaaattaatgaccgagtgtaatcttcacactattgttcgattacccaatggtgtttttaatccttacacaggtattaaaaccaatattttattctttacaaaaggaaaaccgacagaacatatttggtattatgaacatccatatcctgaaggtgtggtaaactataataaaaccaagcctatgcgttttgaagagtttcaagcagagatagattggtggggtaatgaaacagatggttttgcgactagagttgaaaatgaacaagcatggaaagtttctgcccaagatattgtagaacgcaactataaccttgatattaaaaaccctcatgtgggtgaacaaataacacatgaccccgatgaagtactagaactctacactaaagagcaaggcgaaataaccactttaagaaaccagcttaaagctatattagcagaagccttaaataataactaattatgataaatacaattataaatagttttgacatttggacagatgcacaaggaataaaagctaaagggcgaattaaaagtattgacaacataaatatgttaggtattaatcatttaagagcattagtacttgatttagctgtatatggaaagctagttcctcaattagcaagtgatgaatctgcaaatgaattattaaaaaaaggcttaaaaagaaagagtataaaagaccaagaaccactaaaggaaaaaggccaatttaaccatgatttacctagtggatgggcattagcgtacatacctaatatcctaaaggacgaaaagtatgcaataaaaagaggcccattcggaagttcattaagaaaagatttttttgtttcaaaaggatataaagtctatgaacaacaacacgcaataaaagatgatttttcattaggaaattattacatcgatgaaaataaatataaagaattaaaagcttttaaaataaaatctaatgatattattattagttgttcaggtaccgttggtaaagttgcaatagcgcctaattggattgaacctggaataatcaatcaagcacttttaaagttatctatcaatgaaacaatattgttgaataattattttaaaattctgtttcctgctttttatatgaaaacagagacactttcagaattgcaaggaactgcacaaaaaaatatggtttctgttgacatcttaaaaaatgagcctttcccacttcctccgcttgcagaacaacatcgcatagtagcaaaagttgacgagcttatgaatttgtgtgataagctagaagatgaacaatttaaaaaactaaaaacacatcaagctttagtaaaaacattattagcaactttaactgaagcagcagataccaatgaattacaagtggcatgggatagaatatatgaacattttgacactcttttttgtactgaggatagtatcgagcaactgaaacaaaccatactacaattggcagtgatgggtaagttggtcaagcaagacccaaatgatgaaccagccaataaattgttaaacaaaatagctaaagaaaaagacaggttggttaaggaaggaaaaattcgaaagcaaactcccttagcaaagattagtgaagataagacaccttttgaattaccaagaggttgggaatggacaaggttaggtgaaattggaataggaagtactggtaaaacaccaagtacaaatgttttagaatattttgatggagatgtaccttttattggaccaggccaaataacgtctgagggcaatattactgacacagataaaacattaacagttgaaggtttagaatatagttcaattgctgaagccgatgacttattaatggtatgtataggtggaacgattggcaaatgtgcaattgttaaatataaaatagcatttaatcaacaaataaattgtattcgtccattgttctttaattcacatttcctatatgatataatgaattcaatatattttcagcaatcaattttaagtaaagcaactggttcagctacgcccataataaatagatctaagtgggaggaaataatgattcctgttccatcattatctgagcaagttcgtatcgtccaaaaaattgatgaactcttcacactatgtgaatctctaagaaataatatcaaaaaatcagaagaattaaaaggtttactttccaaaaccataattgtttggtaaagaaagatcaattggaacataacccgctcctgattttaaaatggataagattcccagtaaagaccagtttgaagtatccatcatgatccccatcaaatcattttctttcagatcgtaagtctgctgatagtaatacgctaatttcgtagcggcttcatccagctctttatacgtcatacggctatcattataaacaaatgcaatagcatcaggggttttagctgcctgtgcctcaaaaagagacaatacagttccttctcctgataataaataatcaggggtattacagtctactaccaatgcctgctcttcttctgtgtttaacatcgtcaaatcacctattgatgaggttccgttttctaagacagctgttagtaaattctcgtaatgtgatcttaatcctgataccgtagaagagctgaaaagatcagtgcaatagttgaatgaaaaagagattccttcaggtccgtcttcagcaaaaatcgttagatcatacttcgctatatcatagttcattgccatcggttcaatggtaatatcactgaattctgctacttttgctcccggattgttgtttaaaacgaacaatacctgaaataaagaacttctgcttttatctcttgttttttctacacgatctactactttttcgaacggaacagcgatatgatcgtaagcttctaaagtggtttgttttaccgatttcagcaactcattgaacgatgggtttccggataaatcgcttcgaagagccaaagtattcacgaagaatccaatcatagattctaattcctgctgcggacgattggcaacggtagttccgatacagatatctgactgtccgctgtaacgatataacaatactttgtaaatactcgataacaacatgaataaagttactccctgttcttttgcataagtgcgtagtgcctcgctgcggtcgctgtctaattttaaaccgatgaaatctccacggttgctttgaacagcaggtctaagataatcagtaggcagtgctgaaggagctacgtctcctagttttgcctcccaataatctaatttctttgctaaaacatcgccagacaactcagaacgctgccaaaccgaataatctgtatattgaaaactaagcgccggtaaatcggcttctcttcctgacgcatacgaagcataaagctctttaaattccttaacaataagggattcagaccagccatcggttgcaatatgatgacgtaccaatactaaaatatgttcttcatctgatactttaataattgtagcgcgcagcatataatcttttgataaatcaaatggttggttgatttcttcggcaataaatttcttagaatctaaaattcctgaaacaatattcaattcccaacgatctgaggattgtacagcctgatatgccacaccttctttttctacaaaaaaggtacgcaacgtctcgtgacgttctacaattgtttttagcgcctgagaaagaaagtctattttaagatctccttttaagtttagcaagaccggcatgtggtaatgctcgctcccttttaatttatcaataaaccataaacgctcctgagcatatgacaacggaatatctgcaggtaactcttgtttggttaccaacggaagtgcggctgtattgtccttactttctataaaagaggctaaagccgaaatagttgaattattgaatatgtcacttacagtcaccgaaacattcagcgcatttttaatagccgacaacaaacggacagctaacaaagaatgtcctcctaattcaaagaaaacatctgtcactcctactcgctcgatttttaataaatcctgccagatttcaactaaaagttcttctactttggtaacaggtgctacatattcctgctgaacaaaatcactgctgtttactgcaggtaatgcttttttatcgactttaccattcgaatttaaaggaaaactttccagttgaataaaataagacggaatcatataatcagaaataatttcttttaatgccttccttaatgtcacaacattatagttttctgaggtaaccacgtaagctactatttctttttctccgtttttgttttcaagtgctaaaactaaggcatcctctatttctgattgttttaacagcgcattttctacctcacccaattcgattctatggcctcgtatttttacctgattgtcttttcggccgataaattcaatatttccgtctggcagccattttccaatatctcctgttttgtaaatcagttttccaggaataaacggatgtgcgataaatttctcttctgttagtacaccctgatttaaatactctttcgccaatccatcgcctcccacacaaatctctcccgaaacgccaataggtactaatgcgttatgattgtctaagatataagccgtactatttgctattggagctcctataggaatagttcgctgattttttctcacctctttaatttcgtaataggtcgaaaaagtagtattttctgttggcccgtatacatgatgcagattcacttccggatacagttctttaaacttcgctacgtgttttacagaaacctgctcacccccaaataatatgcattttaacttttttaatgaattcaatttagaatcgaccagggtattaaaaaacgctgtcgttaaaaagaaactatcaattttttccgattctatcagagcatcaaacttatccaaatctaaaaagatatcctttgccgcgattacaagagtccctccgtttaaaagaggcatatagatatcaaaagtcgctccgtcaaatgaaaagttcgacagtcctaagattctgtcattttcacttatgtcaatataatttgtattttttactaatctgacaattgatttctgttcaattacaactccttttggaactcccgtagaacctgacgtatacatcacatatacagccgaatccggttgtaaattctctacttcataactggtttcatatcgattggctgtttgtctgaaagtctgtaaaatgctatcatttatacttactttacagtttgcatcttctttaataaacgaaattttctccgaagcaaattccggatttattggaacatatacggctccaagtttaagaattccaaacatggacaccaaaaaccactcattgcgatccagttctaaacctaccatatcggcagcttgaatatggtactctgattgtagaaaatgagcaaactgattggacaacacatctaactcctgataagtaagcttttggtcttcaaataccactgctgttgcattcgctctttgcgctacttgctcctggaacagctgcacaaccgttttatcaccgggatacaaaacgttggttgcattaaaatcatacaacagttgatgctgctcttcctgtgttaaatattgtattttctttatctcttcattaggatttgtaaataccacatttagcaattgcttataatgtgtcatcaatctttttatcatctctgtttcatatacatcagaattatagataatgtcaaaagaaatatggtcggctgcttcggtaaaagtaaattgcagatcaaacttagccatcgtagctccgaggtctcttattgtatcaaaatcatcaattgaaattactccatcagctaaagatgcttctgaattttgaacggttagcatcgcatcaaaaatcgcattgcggctgatatcacgcttactattcaaatcttctatcaaacgatcaaaaggatacatctgatgctcaaatgatgttaaagtatcttcttttatctgattgtaaaatgctgcaaaactctcttgcggatttacaacattatgcaaggctaaggtattgacataaaaccctatctgatctgttaaatcagcgtgatcacgtcctgcaaccggacttcctataataatatttgtattggatgtatatttatgcaaaagaacattcaaagttgccagcaggctaataaagatacttcctcttttctcttctgtaaaacgtttgatgtcttccgtattttctttagaaatatacgatttaaggtggtgcccgttatgggttttaacagcaggtctcattccctctgaaggaagatctaaaactggtaaatctccggaaagacgctctaaccagtatgctttatcaatgtctgccttttcagtctctaattgtaccgcttgccagtttgcataatctttatattgaatggcaagaggtgcaagagccggagcagtattatttacaaaagaatcataaaatgcaaaaacatcttttgctaatacattcatagaccagccatcaccaataatatgatgcatgttgtaataaaaaacataagtctcttcatctgtctgtaacaaacttacgcgaaataaagggcctttttctaaatcaaaggctacagatgaatcttccctgatgtagcgggatacactggctggagtatcaacagtatttctgaaatcaacataagataactcaaaatttaccgccactgttggctgtacatattgtctaacctcaccattctcctccatcttgaaaatcgtacgtaagatctcatgacgatctatagtagctgttattgctttttgaaaacaatcgatatcataactccctttcagagttgtatgcataggcatgttgtatacagctgacccaccttcaaactgacttaaagtccaaagacggcgctgtcctgcggataactcataactttctgatacagggatagaagaaattacttcaaagttaaacttcgaactgtttttactgcttttaagtaaggcgataagacgatctttattggttgaaatatcgtttttatcctctgcagtaagagctgctgtatttcctgttactcttaaattttcttttgaatcatcaagaaaaatttgcacttctttattgaataagccggtaattattgatttgatatctttcatcgtaatagtgttttctaaatgctttatttttgaattaataactgatatatttaaaataacctatgtataacaccaaacacattgttctaaaagacaatgtgctgtgatgtttttaccaggtagtaaaaactagattttgatgtagtaaaaaaggattgaaataagagatcttttacactttatagcaagtacaaaaatcactttattgattcgctccattatagaggaggcgataatctaatggaaaagaaaatctaaaactacgccttagcaaagacgttttctgctggattggatagatacgacaatggtattatggccgagatattctggcgtaatgaacttaatcgtacactgattctgtgctgattgtcgactctgaaaacttcgcattccaaacctgatagttcaccatgttcaattttaagtttatcgcctatttttggcagtgccgattcgacttgaacgtcggtgatgtcttttccctgggtgaagagtctgatataagcgatttcttcttcggaaactttgccatattctttgccgaaagacaagtacgaacagccactctctacatttaatgcatcatgaaagtctttattggatttgatgtttacaaaaacataactcggaaataatggaatagcgctaaaccaagacctgtcagtaacacatcgtttatctctgtgttataaactccgtgaacacgggtttgcaaaagtcctgtggtatgctgatccagagcgaaagattccgaagaatcaattacagctgcacgaccttcttctaccgctttatcctgcgccaagcctgcaatctgatgatcacaaacctgctgccagtaaacacgctccttttcaagtttgctgcctgatgcatattccttttgaagcaaagcccatcgctggaaagaatcggtctttgccggtaaggctgtttttgcaccttccttataaccggaatacagactcgataaatcttctaaaagtatacgccaggaaacgccatccaccaccaggtgatgaacaatcagacccaaacggtctccgtcttttagcctgaaatgtgctaccctcaacaatggaccttcagacaagttgatacttgattgcagggcttcccctagttgtgccatctcagcctgagcagcttctgattctcttaagtcatagaagtgaatcatgcagcgattggagcttacagctccattaaactgctcccatactccctgattctgtttataaaccatacgaagggcatcgtgatgcctcgtcaaatcttctatgctcttctccagtatactgctatccagctcttccttactatacagtaaaacagattgattgaagtactcatgtgcttgtatctcctctgatttgaaaaaccattcctggattggggtcagcacaacagcaccgctcacttcactttgatcgctaacctgggtggtcagctccattaaccctgccagatcttccagtataggcgttcgaagaagatgctctactttaagtctgtagccctgttgttttaatcgggctaccacctgaattgacttgatggaatctcccccaagattataaaaactatccttgataccgatgccttcttttttcaatacagctgaccataccgaaactaaaaccttttcctgttctgttcccggtgctacatattcaacaccgctcgataatcctgcgccttcagggtcaggtaatgcttttttgtctattttaccactagtgtttaatgggatggcttcgagttgaacaaaatgcaccggaagcatatactcaggcaccaactgttttaaataagttcgtaaatcacttgcattctgcgcgacattagaaacgatatacgccacgagttctttctctcccgactcgttctctctggctacaacaactgattgacttacagcttcatgttttactaaagcatgctctatctctccaagctctatcctgtgtcctcttatttttatctgatcgtcttttctccctatgaactcgatgttgccatcagatagccaacgacccaaatcgcctgttttgtacatgcgggtatagttcagatcaacttgcgttttttcctgcttgtttccacaaaatataaaaagggtataatcctgcattccatttttactacttacctgtattttggtctgaaatagttctatatctgcaattcccgcttttaacagcatttccaccagatagtatcgatcttctttttcactaagtccgggagtaattctattttcttgttttgtataatcaaatgcactttgattttcaccatcttcatgggcaacaattggtaataacgttcctagtataaacctaccgccttctctcaaaagcattgacatgttccttactaaattactcgggtactgaacacgatccaatgttagagtacttaccacaaagtccatagagttggcttgtaacttactttctttcaaaaatacatttacaggcatgtctattcgacaaaggatcccattaattttatcgttgatcagctttttaacgaaaaagggattcgcatcaatacccgtaatatgataagtcccatttgcatttatactacgaacaagttctccacttccacatccgagatctataccttttgataagggagctaaattgttagtgagcttcaggaaaacttcccaggagatactttgagccttataattatcaaacattccttcataataatagcgcaaaaatgttgatgtaaattctttctctaaatcattatcttttattaattggatagcctcgttttttagtttaccctcaaaattcttttcaatttcaaaaatgatctcttctgtagataatccataatctaaccgttcatttatttctttaactgttagatattgtggagcctcaatctttttaaaggcagtattagaaatctcacctctgtcaacgtatatctcatccaaataaaaataattagggacaaaacttgaaaatgttttccatctattatttaaatacgctctcgctaaacctggcccgctaagatacatttcgcccggaacccccaacggtgttaactctcgatctgtatccagaatataggttttaagattttgcctcgatttaccgataggaacgctcaacgaatcaactataccatgccacgcgtgagagtaaaccgtatactcagtagggccgtagccattcacaaaatgacatttttctgtccagcgctgatagagttccgaagaacatttttctcctactgacacaatggttggacatgcgataagcttttccggatccaactgtttcaaaagagacggtactgttacaactacatctatattctgttcattgataatttcaaccaattgagaaaaattttctttgcgaatcagtgttaatgttcctccatttgtgagtgccataacactttctcccaccgaagcatcaaaactaaatgagcccatttgagatatcttctttggtacatccagattaaaataacacttttgccaatacgataaatctaccaaagaatgatgctctatcatgaccccctttggatttccagtggatcccgacgtatggatcacatacgccagattatccggagcaattttacccgggcatttttcaacactataatcttccggcacaaactcaacatcaatggcaaacaattctccttcataaaaatccatatcataaatgaagtttgcctctgttatcagtaattttaaggaaatgtcttttacaatttgttcctttcttgaagatggattctcaggatcaataggaacgtaagcccctcctgcttttaatattgctaatacagtgataatcgcccattccgttctgtccaattgtattcctactaaatcctcagtagtaattccataattttctcgcaaaagatttgcaagttggttggaacgttcattaagttcctgatacgtcaattcgatatcctcaaatactatagctatattgtccggagcctttgcaacttgttcttcaaacaaatcgacaatcgtcttatcttttggataagaaactactgtatcattgaatgtaactagtagttcatttttttcttcttctgacagataatctatttgtgctattttctcttcaggataagataatatcgaatttaaaagatttttgaaatgtttcattaaacgctctatcatctcgcgctcatagacatccacattaaagattaatttgaaataaatataatctccaacctctccaaaatgcagctctatatcattcttaaccttcaaaggcccattatccgacacctggtttatgaccgtatcatccgatatctccaagtcttcattttccgtaatattatgataggtgatcgagatgtcaaaaatcggacttctgcctgtatctctctgaagtcccaactcttctgccaatcgatcaaaaggatacatttgatgattatagctttttaaagtatgctcttttacagactggtaaaaatggttaaaactttcctgagggtcaacctcatttcttaaagccagcgtgtttacataaaacccaatctggtcttccagatccgcatgatctctacccgctaccgggcttcctatgatgatatctttttcagatgtataacgatacattaacaccttccatgaggctagtaagctcatgaaaagactgccgccattcttctggatatatccttttagtttagttgttgttgctttgtctagataagtggctaagccatgaccgttataggtcttaacctgaggccgttgtttggtacttggcaagtccagcaatggtaattctcctgagagcttgtccagccaatattctctatgcgccttaaatgactcctggttcaactgggccaactgccaggctgaataatccttgtattggatttttaattcctttaaatcaggttctttgtctgccttgtaagcttcatagtatttgaatacatccctggacaatacttcattagaccagccatcgctaatgatgtggtgcatattgaagtagaaaagatactcctcttcctctacatgaagcagggctgccctgagtaaaggtcccttctccaagtcaaatgcccggtaagcatctgcggtaatatagtcctctgtctttcctttcttgtctgcttcttttctaaaatccatatactcgattgaaaagtttaggtcttccctttccaatatccgctgtccgatctctccagactcctcctccctgaaaaccgttcgtaagatctcgtgacgatcaattgtggaatcaatggctctcttgaaattttcaatttcaataccttctttcaagtaagtacttccgggtaagttatacgctaatgaacctccttcaaactgactcaagatccataaccttctttggcctgatgacaatttaaattgctccagtcccttgactggagtaatgtcctcataattagattttatatcctctctacttaagtgctctaataatgcatttttgttttttttaaccttgtataataaatcatcaggtattgaatcgctgttgaattcaatattgagtttatctccgattttagaaagataaacaccattttctaataattgagcgattaatttatccatttagatttcaattttgtttttataggttactgttttaccttcttgctgtaattttaaaatatcttttatcaaaataattttctttcctaggttttgtatgttagtattctcaagaatgtcaataatttttaggtcaatatttaattttttatgaaccaatgcgattaatctcatcgccttcaatgagtccagccccaaatcataaaaatcatccaatattccaatcttatccctttgcagcacttcttcccaaatctttaccagatcctcttccagctcattccgtggcgctacatattcaaaacaacccattaatctcagccctttcggattcggtaaggacttcttgtctattttgccattagtggttaatggaatggcttcgagttgaacaaagtacgacggaagcatatactccggcaacgactgttttaaataagctcttaaatcacttgcgttctgctcgacattagaaacaatatacgctacaagacggagtggcttttgcttttatagcactttaaaagtggttaatgtatcactaatattgaaatcaccgctgaagaaattattcaatatggtataacgccgttacttaaaaatatacctagtagaaaaatggcacgaggaatagaacaaaatttaatcaatcataatggtttaaaaaaattatagaatcaaataaatagtatatcaaaaactaatcaggcaggtaaacatgctggtactatggaaaatgcggcgcaatatcttaatacgcatttacctggctggaataaataaggaaaatgaaaaaaaataaaatagaaacggggtcaataattaagatttctttagagcacggatttggctttgttttagcgaagtttattaatctaaaagagatcaaagaagatataggatataatgaatttatatatgtttataatcgtgtttttaaggacgaggatattataatagacgatattgacaataatgatttattactagggggtatatacgttcttaatccctatcctgccttaaaaaataaaatatgggaaatagttggggtactcgaaccaaaggaaacggaattgaaaataccagattttaaagattttggacctctattagcttcatatgaaaaagatgctaaaatttggtattgcatacataatgctgaagttaataacaggatggttgttgattacgataaaataaaacatttggaattatttgtctatcgtgcgtatggctcaataattgtacgcttaacaatggaggttataaggcaaaataataaacagatagaagattattatgatttaaaagaacatgatgatttagcatcatattataatactatctacacacctatttattcaagtattccaaaagaaattagaggaaaagctattttgtaatcttatattgttactgagtaagcctgagaaataggaaagtttaaagaatttccttaggtttccggagttagatcagattttgctgaatttactacaaaaaaacatatgaagtaaagactaatatcctatgggcaataaaagcaagagaaaagcaactaaaaaaatataaagctatttttgaaaaagcttatcctaaaactatttggaatacagttttagatacatattaattaagtaaaaaatggagaaaaaggaattagtaaaatttttggatggaatttttgtgccattaaattttaagcgaaaaggaaataattgggtttcaaatggagaaacagtaaatagaattataaatctccaaaagtcacaatacagtaatgctttttatattaattatgggtatatattgaatagtttgcctcttgataattggacatctcacatagatagtcgtgtaggaggtaaagagaaagaagaagaaaaacttataacagatttattgaatttagaaagtgattttaaaacagaggaaagattttatcttttaggaaaaataattaatgaaaaaatagtaaaagaagtacagtttgtatttagcgaagatgatgttttgaaaattttaaaagaaagagaatttctatatactatacctccagcggtattgagacactttaatttaacgttataattaattaaagattttaagcaattggagtcatagaaaatgtaattacagcaaaagaaagggtaatgttacagattaggtgtttttgcaaaataacgatgtaacgaactgaaagagaatataaaattttaattcttgaatagaaagagaggtgacctattggtcgcctctttcgttttttgtcttttaataagccttaaaatgcttttagcttagcttaagcaaaaatcaaccgtctgattctctctgtataactttttgatacaggtttaataaaaatttagtggtaaatttgtaagtacatctaaaatcaaaaaatcagatcaaatagggatatgagcacattattcgttaaaaacatggtttgcaaccgctgtattatggtggttcagaacgaacttgaaaaatttggactagaatttacccacataaagcttggggaggttaccctggcaaaagaactgactgctaccgatagaactttactggagcagaaactggttgctcttggatttgaagtgatcgacgataaaaaaagcagaatcatcgaaaagattaaaaacatcattattgatttggtacaccatcaggataatgataccaaaaataacctgtcggatatcctgagcgaaaagatcaatcatgactataattatctttccaatttgttttcggaggtggaggggactactatagaaaagtattttattgcccaaaaaattgaaaaaataaaagaacttctagtgtacgatgagttatcgcttagtgagatcgctttacgtctgaactactccagtgtggcttatctgagcaatcagtttaaaaaagtaaccggcctgactccaagttatttcaagcaaattcgggcagagaaaagaaaacctctggatgaggtgaagtaaatattacaaatcaaatccataattccacaatacatttcagtgctattcttgccaactttgcaggtataaaagaacaactgaattatggcaacaactgataataataaggaaacaatttacattccgttagaagatgtaaacagcgagcactgtgcattaatcgtagagaaaggattggcagaggttagaggaattgaaactcacaaggtggaagttaacaaccgcagagccgctataacggttaaaggcaatgaaacagttggtaacgctgtgaaggttattaaagaccttgggtatggtgtaccaaccgtaaaaaatacgttcccggttctgggaatgacctgtgcctcttgtgccagcagtgcagaaagtatagtaacttatgaattgggagtagtggatgcttcggtaaactttgcaacaggaaatcttactgttgaatatcttcccaaccttacagatgcttctaaattgcaaaaagcagttcagggcgttggttacgacttgcttattttagaggaagcgaaacaacaagagtctttagagactattcatgcagaaaatttcaaaaaattaaaaaacaaaaccatctgggcggtgttattgtcattgcctgtggtggtgatagggatgttcttcatgaatattccttatgccaatgagatcatgtggcttttttcaacgcctgtaattctttggctggggaaagacttctttgtaaatgcatggaagcaggccaaacatcgctcggccaatatggatacgctggtagctctgagtacgggaattgcttacctgtttagtgtttttaatatgttattcatagatttctggcaccaacgcggattgcacgcgcacgtttactttgaagcggcggcagttgtgattgcgtttattctgctaggtaaattattagaagaaaaagcaaaaggaaatacgtcatcggctattaaaaaactaatgggactgcagcctaaaaccgtgatcgttattcaacccgacgggacagaaaaacaagtagctattgaagaagtaaatgcaggagctgttattttggttaagccgggtgaaaaaattgcggtagacggtatggttacctcaggtcattcttatgtggatgagagtatgttaagcggtgaaccggttccggtactgaaaaaagaaaatgaaaaagtgtttgcaggaaccattaatcaaaaaggaagttttcaatttaaagccgttaaagtaggtaaagaaaccatgttggcccagattatcaagatggtgcaggatgctcagggaagtaaggctccggtgcagaaattggtcgataaaattgcggggatatttgttccgattgtaatgggtattgcacttcttacttttatggcctggatgcttttgggtggagacaatgccgtagtgcaaggactgctggcagcggttactgtattggttattgcctgtccttgtgctttgggtctggccacaccaactgcgattatggtaggtgtaggtaaaggtgccgaaaacggaatattaatcaaagatgccgagagtttagaattggccagaaaagtaacggctattgtactcgataaaacgggaacgattaccgaaggaagaccacaagtgaccggtataaagtggttaaaagacgtggataggaccaaagatattctgctaagtattgaaaaacaatcagaacatccgttagccgaagcagtggtgaaaagtctggaaggagtgtcaggtgtggttttatccaattttgagagtattaccggtaaaggtgcgaaagcggtttatgccgatgaaacatattatgtggggaacaaaaaactgctggcagaaaatagtattgtcattgcagaatcactattgattcaggcagaagaatgggggaaggagtccaagacggtgatttggtttaccaatagcaagcaggcactttcggttattgcgatatccgacaaaatcaaagaaacatctgttcaggcgatcaaagaattgcaggagatgaatattgaattgtatatgctcacaggagataacgaagcgactgcaaaagcgattgccgcacaaacggggatcaaacattataaagcagaggttttgccacagcacaaagccgattttataaaagaattacagcagcaaggtaaaacagtggcaatggtaggtgatggtatcaacgacagtacagctctggcaactgcagatgtcagtatcgcgatgggcaagggaagtgatattgcaatggatgtagcaaaaatgacgattatctcctctgatctgaccaaaatacctcaggcgattcgtctgtctaaacaaacggttgcgacaatcaaacagaacttgttttgggcgtttatttacaatcttatcggtattccgcttgcagcaggggtactttatccgataaatggatttttactaaacccaatgattgcaggtgctgccatggctttgagcagcgtgagtgtagtgagtaacagcttgcgtctgaaatggaaaaaataaactcttgatgcgtttgtcaaacggcggttccaaagattatgggccgccgtttttatttgtagaccatctgactgaaatcattttaattcctggaaatatcgtacttgtatacctggaaagggcgttagactaatgaattcaggtttctggttaattactatggcgttcccctccgggtcgggctgtccgctaaatcttttgtgatagccattttttgcctggcataaaaataacaggaatcacaaaaggataccgctttcatccctaacgcagtctgcgacagagggaatatttaaggaaaagaacccttcttatctaataatttatagagtattatgaagagtattgccctgaaagagcaaaaacatcagcatggtgctttcatccctaacgcagtctgcgacagagggaatatttaaggaaaagaacccttcttatctaataatttatagagtatcctagactcttaaatctatccaaattagtacttccttttattgaaatgtcagggtttgctttccctatgattgattcaatatatctaaaacaatcaaattgattgagtttatattttttaccattaaatttttgtgctgatttcgatattgcatcatttaaattacgagttacttctattgtttttttgtcggctgcatcgatatcatcaagagatattttactcaccccagttttgatttcgatgatatcatttcgacccatagtcaaatgtgtcatttgctgcactccttttgaatcagtatatatcaatctataatgatttccgctgccaatatttacatcctgccttataattgtaattacgtcaagcccaaaaaaatcaaatgttgcattactatcttctacataagcataaaagtttgggttgtttccatgtaatccaatcggatcttggctaatatatcctccagtttcaggattataatacctaaacctattataataaagtcctgtctctatatcctcatactgccccaactgcctaaaagggacaaaatctcgatcaccttttagattacgtaaatctccgtaaatatcataatccgtttcccagactaattcgccagtgtcattataagcttgtacgggtctgccaatataatcattgataatagaaaacttttcatctccaacaatcttagcgcttggaacaaacgaacctccttcatacacccaagttatgagattctcgataggttccggtttatcatagactaagtcatcctcagtggctattaatttaggacgatcttttaaatcgtatttccattcatgaataagaacgtttccatcccaaacataacgatttattctttggtttgcaatttttgcggtacgtctgcccagggcatcgtactcaaaatgtaccgtttttccatccgggttggtgatgctctcgagcataccattcgccagccagctataggtggtatctccgtcctgccactgctcgtgttcttgctgtaatctgctttcttcggttttgttgcctgccagtttatcgatccagttggttggttcttcgaattttagtacttcgttgatgtttctggtacttttgtgtatcagattacccagttcgtcgtatttgtaatgatacttttcgtcctgtaacagtttaccacctttaccatacttacgatcgctacgatcgggagttttataaagatttcctactgcatccggggttttgtaaagctgttctttaccattataatctgcctttgccagattaccaaagtcgtcataatcaaagtaggtgatattggaagtcatttggtttaccgcactgcgcagttgctggttggtatcccagttgtaaaagcgtgatccggtgcgtttgccattggcaaatacttcctgttctttttgttttccgctgttgttgtagctggttttaatgtggagtccgccggtggtaaaacgctctatttctcttcctagttcgtcgcgtttcagggtggtttcccacttctggtgctgttctttgagttcgttgctttgggcttctatgcgctccaactgtccttttgagtcgtaatgggtactgatctctgctcctaatgaactatttatacctatacgctgtcccagtttgttgtaagtggaggtaagggtaatagcattatcatctttatcaagctgttgtttttgggtttcttttacgatacgccccatttcatcacgctccagaagaatgcttacgttttggttcacggcttctgttaaaagtccgtttttgttgtaagtgtaggtttcccaggtaccgtcgtgatagtcggctctggtgatgcgtcccagtgcatcctgctcgtacacagtaaattttccgttgccatgatcaatcctggtgacttcacctgccagattgcgctggtactttttcaccataccgtcaaaagcggtttctttgattatttgtccggctttgttgcgggtaaaatagtagacttcattgtcttcgtttttgatggcttgcaactgttccatcttgtcgtaatcaaaacgtacttttacgccattttgctcgcgcgcagcaagacttcccagtggggtataactgaacttaatgttatttttattgtcttttagcgctatgacttcgtcataattgttataggtaaactgtatgacattgctgtctttctctacaatttgtcttacgcgatccaatgcgtcataactaaaataatcggccatctgcattggggtgtagatcgcttgtacgcgtccgcgatggtcgtactcccatgattttagtttttggttgttctctcgccactctatcagattgtattgatcgtcataaatcagttcgagtttattgttgtttttggccactgtcgctagtagtccattatcgtgataactaaagtgggtagtggttttatcgggagcaataatcgttttaagctgatcttctctgtcttctttgtacagataaacggttttattcccttcgggatctatggctatcgacgggcggttttcctcatcataaatcatgatttcttgggtaccatctggataaacagtgccggttttgtttcctctgtcatcataattaaagcccaggatgcgtccttcgggatcaatctcgcgatagagctccataaactcggtataatcgtaaaaggtgctgttgcccatggcgtcttttacttgtgtaatcagctgacttggctcgtaataataagtggttacagctagattagagtctgttatcagattgtaaccttcctcaggatggtattccatccagccttcctgccaaccgccatcaccccaggtgtgtatacagcggttttgagtgtcatattcccagtaaaaagcttgtccgttacgatccgtttttttgaccattaaatgattttcatattcaatggctgtcggtttttgcaatgcatcaataattgcacttatgttaccttcggaatcgtactcatacgccactaaaagttcgtcctgttccggtccgacaagttccagcttttgaatgaatccgtccttagtgcttactttgatttctctgcctgcagcatcgatgatttttttcagacggttggctgcaaattcgaaaacgatgttaagtccgctaacattactaattttagtaagttggtattttttaccgtcaaacagggtaaaatcgcaaaaaagcttgctttgatgatcgtaagcctgatagccgtcgggagttcttttcagagttgttttttcttcacggaggtaaaattcttcttcaggcagcaatattggaaaagcaacaagtcgcccgtcgtccatgcgaagtcctaaggcattgtcttcggtatataattctacagctctgtcgtagacactatgcattccataaccaagccagcccaaataatcagaatcggagtaccagcttcgtttccagtttagtggaatcggactggtcaaatcaaaatcactaccttcataaatgaccgcgccattgatcacgtttacgggatcattagcacactttcggagtccatctttgagtcctttaggagttttcgatcctttaaggttaatctttttaacaagtcctctgacttttttcatcagagtactaaaaccaatactagctaataagcctgtaaggactcctccccaatcgggaggatagggtccaccaaccattacgggttttccggtagggataggcaatgaaaatgaggttggggcaaaaagggttggggcaaacggtaacattttcttgcctattttggttttccctaaagacatcgatagggggatgccgatatcattacatgtcattagcatatgtcctttgggactcatcctcgtaccgtctgaaaaaacggtttttgaggcgaaaaaattcatactttcatggcctatgataggtgtcataagccagggcggtgtaaaaagaggaatgtgcatcagtggtattataataccgctggtgtccgagtttccacgtttaaaaccatttacatgcaccgtggcacctaaaaacggaatataatcaaaaggatcgatgacaatacctatataaggatgaaaagggttaaaagggggtagggtagtaaaatggatgtctatccccactacaatggttaaatggttatcggttaatagcatgtttagtaggtgtcgcttaattattgggtgcttctattatattggggggctatttatttgctatccaatgtcatcacttaaagaatgatatgtccatagctttttgtaaatacattatgtttactttatttcttgtaggaagaagaagaaaatcgaaatacagttatgaacgaaaatacaacagtattttggatacacaaactaatttgtaagatttattataaagaaaaggctctaatttgttagtttaagaaattagaaaaaaagcatataaaaatcccacttcttaagaaatgggattttttttctgactttggttagacaaattaaaaatcattctacttgctccaatctttttttattctaatttctttatttgcataagatgaaaaattacttttattttaagcaatgaaattttgttttatgatactcagaaagttcagatttatcgatagcaattataccaatagccacctatgagaggaatattttttacagtttgtagttttatactattttttagttgtcaaaataatagtaagccggcgcagaagaattctgttatgaaagcagaaagtaaacctaaaaataaacttcatggaaatgacaacaaagtttataaccttacattagtcaagtctttgccaaaataccctggcggcatagagaaatttcatgttttcctaacaaaaaattatgtcgtaccgaaagaagtggctgaagatgagcaaccttctggcgcagttttcgctactattatcatagaaaaggacggaaccgtgtctgatatagaaattcttcgtgattttggttatggttcgggaaaagaattagaaagagttttaagattatgtccaaactggattccggcgactatagacggagaaccggtgaggtgtttgtacagtattccatactatgttcaataatcaattattatatataatgaaaaactatatttatatcattttgtcttttggaacatttctttgctatagtcaggaacctcccgccatttttaaattaaaatacagtttattaaatactgattcaaatcacttactaagtgaattcagaatagattccccttcgttagagtattataaaaaatcaaaaaacgcctatttgacagaaagcaattgggacaattacaatgatcgaattaggattgataatgagtttgcttatttttatatggggaacccatttcctagagaaaatgacataattattttgaatatttttagaaaggattatattaaaatcgacttcgctcagccggacaaaaaccactctttatattcagctaggcaaaatcactccttatatataggtagtaaaacaacaaacccgacaggttttaaaaacctgtcgggttgtatactatataagtacaataaacaaatctactactatatacttgatctttcttaagtgatacactaaatgagctatcgaaattcaattaagatttatgtaaatactatgtaagcgctctgcacgactcaaaaaactcgtaagctcttttctcggcataggaatactctgagtcacgcaatggaaaagcacagtgcccgccatatcttggtgtttccagatacacgtaggcgctgtcctgtgctatagctctgggataacatctttctcccagaaaaggatcgtctaatgagttaataattaaaacgggggtggtaatgttttgaagggagaattcaggagaaacacgctgataataatcatcacgacttgtaaagccatgcagcggtgctgtgaagtactgatcgacttcatcaaacgacgaaattttatctatctgatcccggtttataaaatcgggaaactgtgctgccttgtatttcagctttcttttgatatcaattgtaaagttctttaaataaaccctgttaaaaccttgtttgagtacagcagcacttgtagcaatatgtgtaggtaccgaaattgtaactgctgcttttatgcgttcatcaattttagtccagcctaaataattcagaagctgcactcctcccattgaatacccaatcaaatagacgtcttcgaattctttttgaaaaacaaaccggactacttcgtcaagatcatctacggcaccatgatgataaagtcttggaagacgattcatctcgcctccgcaggtgcgattgttccatgcaaaaacggaaaagcctttctctcgaaaataagcagcacaactattattataggttctgcgcgaatcaccttctaaaccatgacataaaatgactgcttttttagagtcgtttataataaaatcgatgtttataaaatctccgtcgcttaattcatgcttttttcttgtatattcgggaacttcatactttttaaacaaagcagcataaatggtagaaatatgcctgttgcgatgcataatagaaggcagattatattctgattgttcaattaatggcatgattaaatagttttatggtgctatacaaatctaagaaatcaatctatatcaaacttaatcctctcttttttattttacttttaaaaataacaaaacaacccaactacataaattaacaggaaactaaagggaggagtacctctaatgataatccttacttatagacacaatgcgtaccgtttataagtaaaattacttatttaaacctggctgactctttctccctttaattcctatcaaactaaataggaaacacttttaaaaattttgcacaataagaaaataaagaggcaatccaatggtgatatttatcgggaaagtaactgccagagccattggcagaaacaatcccgggtttgcctgaggaactgtaatcttcattgctgccggaactgcaatataagaagcacttgccgccaatatcgcaaagacgaaacgattggttatatctgtcgttacaaacgaacttaatactgcaaaaacgcatccgttaagcaaaggaatgaaaattgcgaaaaggaaaggaaaccatccaaaagagaagaaggatttcattttttgcccgcttgttattcccatatccagtaaaaatatggctaagaatcctttaaataaatcatttgtaaagggctctattccctgcgcctgtttttcacttgcgagataacctataactaaacttcccaaaataagaagtacactcccattggttaaagaatgttttagtgcggaacgtttttgaatagggcttgttttgtctttattgaagaaggagatcaaaaccaatcctactataatcgccggagattccattaaagccataatagcaaccatgtgtccgtgcaatgccaattgttgactttccagaaacgaaacggccgtaacaaaagtaaccgcactgactgaaccgtaagccgcagcgattgcacccgcatcatgaacctttaattttctcttgaggatgaaaaaggtataaaccggaattattcccgagatcaaaatcccgaataacattgaccagacaatctcacttgtaaaagcttcatgggacagctcttgccctcctttaaaaccaatagcaaataataaatagagcgaaataaacttcgaagagtttttaggaatttcgagatcactctttaaatagaccgctataattcctaagacaaaaaaaagcagtgcaggattggttaaattttcaagcaataaattaagattcatatgtttggacttttatattttttactgtaattactgcctctctcacagaaaaagcggtactgttatctgagttacctgcaagaggtatctttcattaaaaattgttttatttattgttttgaggctctttcaagacgatcgttaatcgttcgtccgagatcatgatccggaaaacgctctgcaattataatatctactgtcatagcatctaattcatgaagtgcggcatacagctttgaagctgcttctttcaggttaccactaggagaaagaacgacctgatgtttaatgttctgctcttccatgtgttgcatgaaccttaacaatcctatttttttatctgaaaatcttccaatacactccgaaagattatcggttacatataaagtggactgaggagcataatgtttagacagcataccaggagcttcaggagcattttcttctttattaaacaggattgccggtcctgtgactttctctatttcttctttgggaagtgctcctagacgatagatcactacgctttctcctttaaatccaacaatagttgattctattccggctttacaggcatctccatctaataccattggaagtttttccttaaagtaagcctcaacatgcccgggtgtagttggactaatggccccaaatggattagcactgggagcagctaagggaaaatctaattgttgcagcaacgctaatgctacaggatgattcggaattctaacagcaactgtctgatgtcccgctgtgatgagttctgaaacattgcgatgcttttttaacaataatgtaaggggtccaggccagaatttctgtgccaaaatcttcgcaatcgccggaatttcaatggcgatccgatctaaatctccgatggctttgatatgtacaattagcggattgtgcaatggtctctgtttgatatgatatattttgttaattgccttcgtactgtaaatgtttccggctaaaccataaacggtttcggttggaaaaccaattataccttcattttttactatttcggctgcgagttcaatatcgttgcttatcatattttttctgttctcttccggttgttgtgcttaattttcagttattgtgtacggaacttcaaccgttaaaaagatgtcgctttctatttttatttttagattctcctttgttgcgtgatttattatttgggaaattacctcttgactttctgtaagttcggttattctctttaaactaatttcgtcttgttttccggaacgttcatcatcactaaagtttttaaggttgtgaaagttaattttagcattgatcaggttgagtaaaatttctttggcttcgtcgtttgtgaagtctcctttaattaattgaattttttgtgtgtttttcatgggtaaggattaaatttataatgttgttactgattaataatcgaataagatttaataatgttacaatgattatggcatctgaaagccttcttaatagtagattttcaaaaagtacagctcccataattgcagcaatgagactgactgaacaaaacaggatcttaaaaacagctaattttttcttcatttttctatattagttaatgttactcttttcttttttagacttttttaatgttataccattctcgatgcttctctttcattcataaaaacccgggttcttaaacgctggcaaagttgattatttatacttataaatttttatttatatttgtaatggtttacattaaatatttttatgaactatactttacatcagcttcagatttttctaaaagtggtgcagacacaaagtgtcaccaaagcggcagaagaacttcatttgacacagcctgcggtttctattcagctcaaaaatcttcaggatcagtttgatattcctttgacagaggtggtgagccgaagattgtgtattaccgattttggaagggagattgcagaaattgcggagaaaatagtaagtcaggtagaggctatcaacttcaaaacgatggcttacaaaggacagttaacgggaaagttaaaaatttctgttgtgtcaacgggtaaatatgtaatgccttattttttagcggatttcattaaggaacatccaggaattgaattgcagatggatgtgacaaataaaagtaaagtgattagcagtttagaaaaaaacgaagtggattttgctttggtgtctatccttccttcaaacttaaatatcgaaaaattagatttgctgcaaaacaagctgtatttggtgagtaatactaaaacgaagttcaaaagcagtaaaaactcgcaggaagtattcaaaaacatgccgcttatttttagggaaaaaggatcaggtacacgccaaaccatggagcgttttattgatcgaaatgctattgttgtggagaagaaaatggagctcacctctaatgaagcggttaaacaagccgtaattgcaggtttaggctgttcgattatgcctttaattggaatcaaaaatgaattgcataatcaggaactgcagattattccgtttaaaggactgcctattaaaacaacatggagcttaatatggttgaaaggaaaaagacattctcctgtttctgcctcgcttctggaatacatgaaacaggaaaaagatactattgtgaaagataaatttggctggtacgaagagtcgtaaacaggaactgaagtactacagactaagtatcgctattctactaaaaaattactttgagtgtataatctaaaaaaagagaggctgtcaaattttatttgacagcctctcttttactttccctcagattttgcagattcagcagataatagagcggaaaaaatctgcgtgaaactttaggctcttttattaaaatagaaatccccaatactggaagtagatacctactagtagcaacgaaaataaaattgtcgccataacttctgtattcgaaataaacttaagtttaagaataaaataaagtatcgaaatcagggtaaatacaagaaagatccattgtattataaaacttaattctttcatttttttaagagattcaatgttaaaatgttttgatttgatgaaatattatgaataaaaattaatacaatatgtaattttatcaaaacaaaacgattgttagattgttattttaaagataataaattagcacatgtatattttttgtataaatttgagaagtctttttgacatattcataattttaacaaaataatatagtagcgctatggatgcaactttcgcaactggaaaagaacttcaaaaaatggatcctgtttttggtcaattgtcttttgacgatcacgaacaaattgtattttgcaatgacaaagatacaggtttaaaagcaattattggtattcataattcggttatgggaccagctttgggaggtactagaatgtggaattacaatactgaatgggaagcattaaacgatgttttacgcctttcaagaggtatgacctataaatcagccattaccggattgaatatcggtggaggtaaagcagtaattattggtgatgctaaaacgcaaaaaacacctgaattaatgcgcaagtttggtgaatttgttcactctttaggtggtagatatattacggctgaggatgttggaatggaaacaaaagacatggacactgttagagacgtaacgccttatgttacgggtatctctgaagaaagaggtggttcaggaaatccttctccaataactgcttacggtgtttatttaggaatgaaagctgctgctaaaagtcagtttggtactgatgttttagaaggtaaaaaagttttagttcagggaattggtcacgtaggtgaggctttggttgagtatttaactaaagaaggagcaattgttacaattactgatatcaatgaagagaaattatttcaggtagcttcgaaatacaatgcttcaatctattctggtgaagatttgtatacagctgatgttgatatttatgcaccatgtgcaatgggagcaatcatcaatgatgcaactgtagataaaattaaagctaaagttattgccggagcagctaacaatcagttggctgatgagaatgttcacggagcaagattacaggaaagagggattttatatgctccagatttcttaatcaacgctggtggaattatcaatgtatatgccgaattagagcattacggtaaagctgaaatcatgtcaaaaaccgaaaatatctataatacaactttagagattatcgagtatgctgtgaaaaacggaatgacaacgcacaaagcggctttgaccattgctcaaaatcgtatcgatttgagaaagattgaaaacgctaaaaaataatttaagctaaaagtttacagtctcagtttacagtctcagttttgcgaaaagtgaaagctgagactgaaagctgagacttttttattcctttcgattgaaagctatgtttttttttttttttaaagcagtttctgattcactgaaaaccgagactgcgactgcgactgaaaactgcgacttttttattcgtttcgattgaaagctatgttttttttaagcagtttctgattcactgaaaaccgagactgcgactgcgactgaaaactgcgactttttttatcattttaattttattataaaaagttaaatacttacttttgcagactaatttttaaatgttcttacaaggtggtaaatagaagacacatacgcgttaaagtaatgcaatccatttatgcaatgcatcaaagcggttctgataatatggaaaaagaagagaagtttcttttttacagtattgataatattcaggatttatatcttataatgctttcttcattgattgaaatttgcaaaaaagagtccgtttttttacatctttcaagtaaaaaacatcttgcaactgctgcagaacgtaatccgaatgaaaaattcgtcaaaaacaaaatttttcaacttcttgccgaaagcaattcccttagtattgctttagaaaatcgtaaaatcaacaactggaatctgaacgacgattatatcattttacttttaaatgatattaaatcaagtgctttgtatgcgaaatacatgagtactataaccaatacttttgaagaagacagacaatttgtaattgatttgtttgctgaagtaattgttccaaatgaaaaattgtatgagtatttagaagatgataaattgacttgggtggatgatattccggttgtaaatacgcacatcatcaaacaattgaaagcgatcaaaacagaagatccggatgatttcagagtgcctaagttgtacaaagacgttgaggataaagattttgctaaagatttattcagaagaaccgttttaaacgaatcggttttggcaaaagaatacgatgataaaacaccaaactgggacagcgaaaggattgcagaaattgatactattattttaaaaatggctatctgtgaattcttaaaattcccttctattccggtaaaggtaactcttaacgaatatttagaaattgcaaaagagtattctacaccaaaaagtagtatttttatcaacggaattttagataatctcgttaaagagcttacagcgaataaaaagatgattaaagtaggtcgtggtttaatgtaattgaggcgaattttcaattttttaaattcgaaaacccaattaagttgtctttctgagcgaagtcgaagaacaaattccaattttgctccgagcgatgctgaagagccggaaaacataaatattaataacaaaaataaaaactgaatactatgcaagatttaatgaaatttgcgccttatttactaatgtttgtcgtgttgtatttctttatgatccgaccacaacagaaaagagtaaaaaatgaaaaagaatttgaaagcagcctaaaagtaggtgacaaaataattactaaaagtggttttcacggaaaaattgttgagcttgctgatacaagtgcggtaatcgaaaccatgtctggaaaattaaaaattgagcgttcagcaatttctatggaaatgagtgctgctttgaataaaaaagcttaaattttttcttcgaaaaaaaataaatttcaaaatagtaagtcccaaattccaaaactggagtttgggattttttttgttttgtgctgaagaaaatgtattgggtaaattattttaacacatagaaacatagattctgtgcttgcataaaaaaggcgtttcacttcatttaaatgcacatatcttgctatgtgaaagaaatgtacttcgctttgtattcttttttgaaaatctatgtttctatgtgtttaataggtttttgttgagtatggttcaacggaggaggtaaattcaatgctagtgcaggaaggtagaaaagtgaaaaacctttatcaaagttttaagctttgataaaggtttgtgtagcttcgaatttggagcttaaaaaaatagaatttaagcctatctgtatttgtcattcaatccgatgttttccagtatcatcggaattactttctcaattctcgaaagtttggttttgtcttgcttggcagtttcaatgtactccagaaattcatattgcttgtaaggactgaacttttgaaatgcctctgtcagagcggagttctgatcgagttctttctgaaaaagctcagaaacaatagcttccttctttgaaggtttgatgatttttccttgtttttcgttctcaatggcttctaagatgtaggtcaaaacttctgcctcgtttatctgatcttttgaagtaaaacgccattggcgcagtgattttgttttatcttcctgagcattgatgagtttctttttttcatctttcaggaaaacgccgttgaagaaccaaattgtaaaatactctttaaaaccacctatgccgataacattttttttgttgtatacataaacgggaccgccccattttacggtttcaaccagttcggttttatcaataatagcttttaggaaaagaagttcttcttcccaattgttgactttatcccaaacgtgttttttatcggacatacttcggtttatttttttcttttaggtttctcgggagcgtcaaaaatgcctggaattgccgttaattcagcgatctttacaatgacatcagtcgctttttgcatactttcggcaggaacatattcgtattttccgtgaaagttgtgaccaccggcaaatatattcgggcaaggaagtcccatgaaagaaagttgcgacccgtccgttccaccacgaataggcttgatgataggtttgatgcttagttctttcattgctttttcggcaatatcaacgatatgttttacaggaagtactttttctttcatattgtaatactggtctttaacttcagtaattacgatatcttctccgaattttttcgcaaatttcttattgatttttttggcaattttggcaattaaatctttacgtttttcgaattttttcttgttatgatcacggataatcaattctaaaacagtttcttcaatgctgccggtaagatggtgtacgtgaaagaaaccttcgtaacctttcgtttcctgaggagtttctccttttggaagttcgttgatgaaatcgttggcaatcaacattgaattgatcatttttcctttggcgtaacccgggtgaacgctctttcctttgaaagtgatttttgctccggctgcattgaaattttcatattctaattcaccaatttggcttccgtccatagtataagcccaggctgcaccgaattttttcacatcaaaatgatgcgcgccacggccaatttcttcatcaggagtaaagccaattctaatttttccgtgtttaatttccggatgctgaattaagtattccatggcggagacaatttcggtaattcctgctttgtcgtcggctcctaataaggttgttccatcagttgtaataatggtttgtcctttatattgtaataaatctttaaaatagttgggtgataaaacgatgtttttctcggcattcaaaacgatatctttcccgtcatagttctcaacgatctgaggctttacatttgctccgctaaaatcaggagaagtgtcaaaatgagatacaaaaccaatagttggaacttcatgatcgacattagaaggcaatgtagccataatgtaagctttgtcatctatggtaacatctgataaaccaattgtctttaattcctcaactaatttattggcaagattccattgcttttctgtacttggagttgtttttgaatttggatctgactcagtgtcaatagttacataactaacaaaacgatcgataatatgttgcattttttttattttatttttaggcaaatataagtaaatagttaggggttgtaaagcgaataaattcaggatagcaatagtaaatgtattctttttttaagaaaaaaactaaaattgacgtgtattttttgctgtacaacgaataaaagtaaaaaagtgttgtatatttaaattttatggttacttttgcacccaattttaacaaataaatatattgtttatgaatcattatgaaactgttttcattttaaatcccgttttatctgaagttcaggtgaaggaaacagtaacgaaatttgaagaatttcttactagtagaggagctgaaatggtatcgaaagaggattggggtcttaaaaaaatggcttacgaaatccaaaacaaaaaaagtggtttttatcacttattcgaattcaaagtagctggagaagttctaattgcttttgaaactgaattcagacgtgacgaaagagttatgcgtttcttaactgtaagtttagacaaacatgctatttcatgggcggaaagaagaagagctaaattaaaatctactaaagcgtaattattatgtctacaatcgagcaatctgcaaaaggaaaaaaagacggagatatcagatatttaacgcctttaaacattgaaactaacaaaactaaaaagtactgtcgtttcaaaaaatcaggaatcaaatacatcgattataaagatgctgatttcttattgaaattcgtaaatgagcaaggaaaaattcttcctcgtcgtttaacaggaacttcattaaaataccaaagaaaagtgtctgtagctgtaaaaagagctcgtcacttagctttaatgccatacgtggccgatttattaaaatagtataaaaaaaatctagtcgctggtttctgtttaatcagaacctaacttctaaaaataaggacaacaacatggaaattattttaaaacaagacgtacaaaacttaggatttaaagatgatgtagtatctgtaaaacctggttacggtcgtaactttttaattcctcaaggttttgctactttagcaactccttctgctaaaaaagttttagctgaaaacctaaaacaaagagcacataaagaagctaaagtagttgctgatgctaaagcattagctgaaactttaaaagctcttgaaattaaacttactgcaaaagctggtggagagaaactttttggttctatcacaaacatcgacattgctgaagctttagagaaatcaggtaacgctattgatagaaaattcatcactagtggtatcgtaaaacgtactggaaaatatacagctagcatccgtttacacagagatgttattgtagaattagcatacgagattatcgctgaaaaataacattttgttaacttcttgttaataaaatataaaaaccactcttttgagtggtttttttttgcctaattttgagaggaataacactctcaaaaccaggaaaatgaaaaaaatctttgcattattactaggtgtgtttgccataaccactgctatcgggcaaaccacaacttcgagtattaaggggattatcaagagttctgccaacgaactcttgcccggtgctactatcttagcaatccatactcccacaggaagtaaatattcagctgtttccaacgaagacggaaggtttaatattttgaacatgagaattggaggcccctacaaaattgttgtgacttttgtgggttttcgaaatcatgaatatgccgatgtgaatctcgatttgggaaaaccttttaatcttgatgtggttctggaagacgaaagccagacgctcgaagaggtgaaaatcgtgtctaaggataaagtttttaaaagtggcaaaacaggtgccgaaactacgattggaaaaagagagttaacggctttgcctacaatttcaagatcggcggaagattttacccgtttggaaccaacggcaagcggaggttcttttggcggaagaaacgatcaatacaataactactccttaaatggtgcggtatttaataatccgtttggactagatgctgcaacaccgggaggtcagacaggatcacagcctatttcgcttgatgctattgagcagattcaggtagcgacagctccttatgatgttactttgtcgggttttacaggagcttctgttaatgcggtaactaaatcggggaccaatgagtttcatggtacggcgtatggtttttacagaaatcaggatttgacgggaaataagatcaagggagaaaaaatatttgtacctactttagaacaaacccaggcaggttttagtttgggagctcctattataaaggataaattgttcatctttggaaattttgaaattgacaaacgaagtgatttaggatccaattttgtggctaataataatgatggtgtaaccggaattaatgaatcgagagttttagaatcggatttaattgcggtttcaaaagccttggctaatttaggttatgaaacaggaccttatcagggatttaagcatgaatcgaattcgaataaagggattattaagatcgactggaatatcagtgacaatcataaactggcggttatttataattttctggatgcttcaaaagacaaaccggcacatcctactgcactgggttttagagggccgaatgcttctattttgcagttcagaaatgccggatatcagattaataataacctgagttcttttctggtagagttgaattcaaaatttagtgaatcggtttctaataagttacaggcgggttattcgcattttaatgattacagggtgccattttcggttccggctcctgtgattaatattcaggacggagcgggtgctaattatattattgcggggcatgagcctttttctatcaataatactttagatcagaaagtcattcagatcactaataatctgaattataatgtgggcaaacacgcgtttacttttggtgcttcttttgagaagtttaagtttgaaaactcttttaatctggccggatatgataattttggaaatccaaacggatatgccggaaccttctttacgccctatttcacaacacaggattttttaaatgatgcggctaagccttttgctacgagtattattgcgcagaatttgaaatacgctcaggatgttttcgccgccaagaataattttaaagtaggaactgatgggggatggaaactagcggaattgaacgtaggacagctcgcattttatgcacaggatgatatcagtatcgatgataatttcaaactgtctttgggattaagaattgataagcctttgtattttaatactgccgatctgattcaaaaatatatagatactaataatggcggagccaaaagaaataacgataccgattatttcaatcctcagactgggcaggcggttaaattgatttcgaccaatttgccaagtgatcgaattttatggtcgccaagaataggttttaactgggatgttaacggtaatgctacctcacagcttcgcggaggatccggaatttttaccggaagaattccttttgtgtggttaggaaatcaggtaagtggcgctgatgatggttttttgcagattatggatccggattataaatggccacaagtctggagaaccagtttaggatttgatcatcgatttgaaaataattatattgtaacggcagatttgtcttataataaggatattaatgcagtacacgttcagaattggggattgaaatctccaaccggaacattagcaggtgtggataaccgacctatttatgttgcagcggataaaggtgcaaacaatgcttatgtaatgacgaactcgaataagggaagtgcatttaatgccactttaaaagtgcagaaaaactttgaaaatggattgtatgcgagtgtggcttataattatttaaaatctaaagatgttaactctattgaagctgaaattacaggagatgcttttgcttttaatccggctttaggaaatgtaaataacgatgtgctttcgaattctaaatatggagataatcatcgttttatagcagtagcttccaagaaatggaagtatggaaaagataaatgggcgacaacagtgtctactgttcttgaatatgctcaaggagggcgttttaattacacgtatggcggagatattaatggagacggctctagtgttaacgacttgatttatatccctacaacggctgaaatagctttgatgaattttagcgcaccgggagaaggtgctgcttttgatcaatttatttctcaggataaatacatgaaggacaggagaggacaatatgccgagcgttatggagcaatatctccgtggagaggaaggtgtgatctgaaaattctgcaggattataattttaagatttcttccacctcagataaaaagaataccattcagtttagcatcgatgttttgaatttcgggaatttactgaattcaaattggggagttgttcaggtgcctacaagtgttcagcctatcggggttacggttgccggaaatacaccaacgtatacttttaatggtactcagaccaaaacgtttaattatgacgctagtttattgtccagatggcaggcgcaatttggtatacgatacatcttttagtaaagcaaaaaaagttataaatttgccctcgcatttgcgggggctttttttataaatagcacagaaagttctccaattttatataagctctttttagagtgtttaacacaagaaaaaaaaatgaaatacgcaagattaacaaaagagcaatttgatgaattgcatgcagaatttgcaagctttttggcaacgcaggctatcgataaagcagagtgggatgagcttaaaataaacaaaccggaagttgcggagcaggaactggatgttttttccgatttaatctgggaaggtgttttgtcgagagcagaatttttggagcatttttctaaaaaccatattttcttattccagtgttttgaaactcatgttcagtcaatcgtattgaaatcattggttgctgaaactgattttttgagtaaagaaggattgcaatggctgtctgataatatgtttaccgaaaacatagaaatgaaggttggaaaaaaagtgttcactgaggagagaaacgcttctatttttgaattaattcagcaaggagcatttttaagtgacggtcaattgtttacgcagatcaacacaattattgaatcataactttttgaagattaaaaattagtaaatgtttaacgtttagatgtttgctaatttttagttttttaacttttgttgaagttttaatgtttttttatacccgtatttctacgcattttttctgaataatttaaagaatgcagttttagtatagtaaatatagatgaaatcgtcttgtaattagtaagttatagactataattatgcgtttaaacccgtagcagcaaatagaattttagcgatgaaaacagtgatgagaagtgatatttttaagcgagaactggttgttgtaaatgatcctattcggtttaataaggaagatcttgtcgagaagaaaatcaattataattacaaaggaattagaggtgtcattaccgatataatgttagatggggttcatttggtggcaagagatctaataatagaaaatgaattttactcgattgaagtagagcacgatttttcgttcataaagcttcatattgaaatggagggtgataatgaatactgccccgagaatgcatcagacagagggatttatattccgcagggacactataatttgttttatttgcccaaaataaaaggcattttaaattatcggactaaaagaagaaaaacgctcgaaatcacgtttacggcatcctatttagagcagctgttttacccaaatttaaaaaccaccattccgcttttggcagaagcaatagctactcatacctcatacgcaatgtgggatacgagcaaaagtatttcgcctaaactgaatgttttgatagaagatatcttgcaatgttcgtactccggagccattaaaaaagcttttttggaatcaaaagtagtagagattctttcgtatttatttaccattataaatgaagaagaaaataccaaagtaagcgtagaacttagtgcatgcgattatgttaaaatccttgaagtcgaaaatattttaaaaacacaatttaaagaaaaacatactttagcgagtattgcatcgcaggtaggactgaataattttaaaattaaaaaatattttaagatggtttttaatgctactgtttttaattatttgacgcaggtgagaatggaatatgcgaaacaaatgatattagaaaaggatctcccgatatctgttgtttctgaagaattaggttataaaaacccgcaccattttacagtggctttcaaaaaaacgtttggatatctgcccagtaagctaaaaaagtaaaagggactaatcttttaaattagccccttttttatctttatcagagagtttgtattagaatttgtaggcgaaactggctacaacatttctgggtttttgtggatttagagtagaccacccaccattaaaatagtctttgtttgcaatattattgatgttaaaagctacgcggaatttatttgaattatagaaaaccgagccattgattacagtataatccggcaatacaaattttccggttttggaactgttcagaatggcattttcactggcataatttcctccaaaaccaataccgaaattctctaatgtaccttcttcaaatttataagtagcccataagtttactaagtttttaggacctgaccaaaagggtcttttgccttgctccagccaaacatttccaacatcaccttttgtaattttactgtcgttgtagctgtatccggcaattatacttaatccttttattggcgcagcattcaggtcaaattcaaaacctttgctttgcgcttcaccaccctgggagctgtacaatggattactggtcactaaattggctacattaatgttatagtaactcacagtagcatttaatttatcttcgaaaatagtcgctttaactccaaattccaattgattggcatgttccgcctcaaaagttttggaaccgattaaattgccatcagagtcataagtcacggctggagcaatatttctgaagccattcatgtaattggcaaatacggctaacttatcttcgacgggctggtataataatccgaattttggagataaagccgtttgtgtataatcgtcattcttatttttgatgtcacctttcgtatcaaaataatcaactcttaaactagccatggctaacaatttagaagtaatgttaagtacatcagacgcatagacgctataagtcgcatcttgttgattaaagtttccggccttttcatttgccagaagtttatcaacagacgtttgggtcagataataaggattggcagcatttaattgtctcacttcgccctgtgctgtaatgttgtaaagacggccataaccggaacctccggacattacatttctttcaaaataatccaaacctgcaacaagacgattgcgcatggatccaattttaaaatcaccaataaaattctgttgaatatcagttgttacggtttgtgattgttctttggtgatgttaaatccgaaatctttatttccgtcttcattgtcatagatataagtgtaataacctctcgattttgatgaacttctggataaaaccgtttgcgaagtccattgctcagaaattttgtaattcatctgtccctgaagactgtatcttggattttttattgatagatcgttgctgtaaaatgataaatcggtattatagtttaattcggctaagttagcatattgtaaagcggaatctctgcctaaaaatagcattgagggcgttgttttttcttccagcattaactccgtatggatcaaaaaggaaagcttatcgtttactttataagaaagggaaggagctacaaaaaatgaagtgcgaaatccggcatcctggaaactgttttcggtttgataagcagtattaattctaaaaataacattatcggcatcgtctagaggagtattgatatcggcagtaatacgatttaaaccgaaacttccggccagataagagacttcaccaccaaagccactatatggttttttggtaacggtattaataagtccgccatagctcactaaactgctgccaaataaagttccggatggaccttttatgacttcgatgcgttcaacgtttgccggatctaaacttccgttggttaaacccggtaatccgtttacaatattggcctggacttcaaatccacgaagactataatacgaaccaccatcaccgccacgacctgtagattcccataacttttgaattccgggtacattttttaaggcatcttcataatttgtaatggcttgttccttaattaattcagatgaaacgatattgtaaacctggggattttcgacattttttaaaggcatttttgaaacataagtactttgcttcggaaaagcttttcttcgattattggtaatgattacctcttttaactgtttgtttgaaaccttcaattgtaagttaagtgttgtagtttcattgatcgaaacaattacttcctgttccagagtttcataaccggctaaagaaacttgcaaagtgtaggtgtttggtcttactctgttaaattcaaaagcgccgtcctcattactaatggtagtgtattttgagtttttaaggataacatttacacctggtgcagcatcaccatcagatgttgtgattgtcccttttatttttccgaaattttgctgggcaaatgaaccgaaaaaagaaaaaaggaaactgattgtaagtagaaaacgataggttttcacaatagaatatttcattttatattgagtttggttaaaataattatttttatttagaattaataaaaacagtgcaaatgtaaagaatactatttctttaacaaatagtttggagcttgattttatgaagtttgagttatatttgagttacttttttcaaaatttagaggggtatatgcagaatgaattaaatttctgacgtttattaaaaaacttaaaaagagtagcagttacatgctgaaagccttaattttgtatccaaattgaaaacttccccatgattttacctttcttgaaaaaactgcagcattcacctaaaggataccgtttggccaatactgtattttttttcctctcaggatttggatattcttcctgggtgtcccgtattccgcatatacaggcgcaattgcatctgtctgaagctgagtttggcgctgtcttatttgcctttccgattggtttaatgctgaccatgccttttacaggaatgctgttaaataaatacagcagtcgttatgttatgctgttgggagccatcatgtttaatattgctctggcgttacccggtttagcagcttttgtatggcagttggtcgtcatacttttaatttttggagcttcgaggaacattttcaacttatccataaatgcacaatcactggaggttcagaaattatatccaaaatcaattataacccgttttcatgccgtatggagtatagctgttttttcgggagcaggtttgggttatgtaatggtgacacaacatattgcaccgattcatcatttacttggcgttagcgtttttatgatggggcttacggcttgcttttatccgatgagtatccataatgagcctgtgccggtaaaaaagaagttcttttcgatgccggaaaaaaatctgataaagttcgccctgatttgttttgtgtctatggcctgcgaaaataccatgtacgactggagcggtatttattttaaaaacatactaaaagcttctccaaaactaaccagcgccgcctttgtcttttttgcaacagcagtaaccttgggacgtctgtttggggattatggcgtaatgaaatttggcaccaaacggattttgttttacagcggagttttaatcacaacgggttttgcgatttgttttgccctgccgtatgcttatccaacaatttttggctatgtcctgattggatttggagtttcctgtgtcgttccgcttgtatttagtatcgccggaagatcatctaaattaagcagcggttcagccttaacctctatctctacaattggctatctaggatttttactggttccgcctatggttggttttatctctgaatatttaagtatgaaatgggcatttttaataatggcacttctggggatactgatgattttgatggtcaataaaatcggggagaaggagtgattttttctgaggggctaagatactaagcttttgttggaaagggactaagctactaagttgctaaggttctgagtttttttaatcgcgaagctcgtagtttttaaatttcgtagggatgaactgtttttttgagttgctaaggcactgagatacaaagtttcaaagttgtttattgtttaatctttaataagagatatgaagcagagaaaaattattagaattcccgtgaataaaagaatttttgtaaattgtttatcttttagatccccactttttttctcaaaatagcttttatatctaaacattgtccctcttcctgtttcataagggattaattccctattgtatatttccaagactttgtaaataatttaaccgttacaaatgaagaaagtatagaaaacaggttttcaaccattacaaaaaggttaaatacagattttcacaatataaattctaattcagaaaatggtatatatgttggtagttatggtagaggaactgcgataaacggagttagtgatttagatttattatttaccctacctgattcagcctatacaaaatataataacagactaggaaataaacagagccaattactacaagatgtaaaaaattcaatcttaaaaacttattcgcaatcagaagttagaggcgatggtcaagttgttgtgattgattttgagaatgattttattgaagtttgccctgcttttaaagaaaaagatggaagttttacctatcctgattcaaacaatggaggaagttggaaaaaaacagaccctatcccagaatctgatgaaatgcaaaattttgatattgactgcaatggaaacttaataattttatgcaaaataataagagcttggaaaaacaaaagtggtgtaaagattggaggattattaattgatacttttgtctataatttttttaaagaaaatcccgattatcaagattatacgtttgaaagttatgatctattagtaagagatttttttggctatttaaaagaattaaatgatgacagagtttactggtattcaccaggaagcaatcaacatgtatacaagaaaaaatcaaattttaaatctaaagcaaaaaaagccttttcaattattgaagaagctatagaaaaaagagagaacaatactgtttatgaaatttggcgttaggtatttggaaaaccatttcattacccaaaaaatattaaagaatcaagccacaattacaatccacaagaagaatatattgaagacaggttccctatcaacataaagtataaattaaaaattgactgtgaagtaactcaaaatggtcacagaactggtttgttaagaatgatgaggtatttatctagaaataaaaagttactctttttcattgatactacagacgtacctgaaccttacgatgtcttatggaaaataaaaaacgagggagaaattgcttatagaaaaaattgtctacgaggacaaattataaatagtaatttagacaagaatcaaagaaaagaaagctcggattttgagggagcacattatgctgagtgctatataatcaaagatggttattgtgttgcaagagataggattgatgttccgataagtgatagataaacaaaactgagaaaattcaaaaagcgtactagcaagacgcttacacaaaacaaaaaaataaaagctaaaaacaacaaaaaaagcctaataaatacacatttattaggcttttttaattatgaaaagataaaacctatttatccttcaatattctttctaaaaactcaactttgtctttttcggcctgaaccaaacgctcataaagttttttattttcttctactgattccattaatttatccaatggattaaatgtgaataccggtccatgagcaaaagcaccattactaccactattatcgtagaaattattaaaataattaaacacactttcttctgaaaaattcttaatagcttcgacagttacccccaaagcttttgcaattggagcaagtttttcatcgtctatagtttcactattctccaaaattgaaattgcctgttggttggttcctaaagcctgtgccaacgcttcctgtttcatgtctctaagttcacgaattcggctaatttttcgtcctatatggtttggttttgcaagtgtactcataattcaaagataatattaacgatcattacaatcaataatgtaaaaaacatattttgctatgtatgatacagtttagatgctttttattattgatttggatatcaaacaaaagtacgatttttgagacatgaaatagttaaaaatgaaaaattatatagattctaaaaaaacagactttcttagtaaaaaatccataacatatgataaatttttcctttgcacatagtctatcgccctttcagggcttaactaaaaaaatcattattcatccttagtgcttcgcactaagctattgctaaagctctttcagagcaaaaaaatcatacgcttcacaccaaaccattacatagagctcttcttgatcaaagattatcaaaaacgggctgaaagcccaaaaagcagtagctgagttccagaagcaaaaaaaaatggaactttctcaaaatacttatatttcgctccgctggagcttttgataactggaaactacattagctggaaacattttgctctgctggagcaattcttcaaaaaaaagggctgagagcccaaaaagcaacaacgcagtgcaacgcacagcaaacggaataaaaaatagattccgccctgaaagggcaaaagcaaacaaacacaaagtatatcattagagagaacaactcaccttatacgaaaacaccacacaaaacttcggaaatgttttctcgttgagatgcgattttcccttctgtagagaatactatttacactttcatttatccccttttacaccacattactgctaagattctcctaaaacaagaagttttaaacattgatgattggtcctgactaatcaaaaaacattcagattatcaaagagttcatttatatttgttaaaactataaccataccattaaaccaatttaaaccaaaaaccacaatgaatacctctttttatctcgagggctttcaaaaagccgccgaccgtctcgatcaaaaaacattagatgaaaaatcaatcgaagttgcagttggcctatacttagactccgtattcctaaaactgtacaaaagatcatggtcaaccaatccgcaggaagcactgacggccgaatcacgaattttcttttcaatttgggttaatgacactagcatcgaaaaacaaaaaatgatgtataacatccacgctttaaaacttagaaaatttaaagtttataccatcgagagtcgaaaatttgccgaagtcttcagaaaatcatttaaaaagtacgaagaaatctggccaaatgtaactacaaatcatggcccgctaaccctaatggaaggctgggtaacattaaactccgagaactttcaggaagagattacagaactcactcataaattcttaaaaattgagtatctaatcgacgacgctttctatcagtttgaataatcgataattaccaaaattctgctcgtgaacaggtttatttcaaagtttaaaaccctaaaaaaagaacagcttcacgagcaaaaattcaaatttcaacttttacttttgtaatagctaaaccttttactggctattttcgtctttaatcccttttagtaaagcataaattgccattgcatgaccttgccctaattcaaaatctgctttaagccagtttacaatatctccggcttttacttcaggtttgagttttccttcctgagtaaatgctttttgttctgccaaagctctaaattcggccggaccattgcccgttttttctttgattgtttttaaatacgcttgaaatgacataaaagttcgtttaattgattcatcgacaaacgaaaatacaattaaaatcaaaacattaccaagattattcttagcttttactgtaaaaacaaccataagtagcgaatagaaccctaccactgaagtagctcgaaaatcctacagcatcccaataacagaacgtataggcatatagtgccctcccctcttatgaggataatggcacgcctaattaaaaggactaaaaaattatcaggaaatgatgaggtagtattttttttccttactctactttaatttcgttttcctcttcaaataacagcttaatgttttcgtaggagtttttcaaagcttcttttatttgttctggatttaaccaggccactttttcgataccttcttcagcctgaccatgaggaatcccttcaaagtctgtatgcatttcaaaccaatgcgtgattttgagtttgtattttccattacgcttaaaaacatgatacgttttttgaagtttattggtaatacgaagctgactcacgcctgtttcttcttccacctcacgaatagccgtagcctcgatttcttcccccttctcgattccacccttaggcaaatcccactttccatttctgaagataaataaaacctcgccccttttattgtacacaaaacctcccccagctttactaacaggaatttttgcctttaaggtcttcataatctccttttcgtcaggatgatacaaataagctttttgaattttattttgaaagattttcactataagctgctcgatatcaatactctctaacaagaataattgaaaattagtctctctcgagatttcatttgtcaaaaaaagtggtttgtcgttcacaaaaactttatacatttgtactatgatttttaataaagatactgccgaaaaaacagccgaattgcttttgcaaataaatgcaattaaattgaatcccgaaaatccttttacatgggcttcaggttggaaatctcctatttattgtgataataggttaattctttcatttccaagcatccgaaactacgttcgtgatgaatttgcgaaaaatatagaaaaacaatttggaaaaccggatgtcattgccggagttgctaccggagcaattggaattggaattcttgtggccgaaagccttggattacctttcgtatatgtgcgtcctgaagctaaaaaacacggaagacaaaatcaggtagaaggttttttacaaaaaggtcaaaatgttgttgttgtagaagatttaatcagtactggtaacagtagtttgatggctgtggaagctttacgcaacgaaggagctaatattaaaggaatggccgccatttttacctatggctttaatgttgccgaagaaaactttaaaaatgccaatatcgatttgtacaccttaagcaattacgaaaacttactggatttagcggttcaaaaacaatacatcagcgaagaacaacagtctaccctgcaagaatggaacgtgagtccatcaacctggggacaggagtaattttagattttagattttagattttagattttagattttagattttagattttagattttagattttagattttaggccagctgattggaaagcgcgtcgagttctctgtaagtcaacgatctgttttcgaaaactactgcaacggcatcaggttttttcccggcttgctgctcgaacatttcaacggctgtagcttctactattgctgctgtttttgaagtactaaaatcttccaaaaggatcgttttctctgaacttgaaatgtagtccagactggacagtgattgtgcagggttttcaacaagagcctctaaaactttaaggtatgctttcaggacacgtttcattgtggcatacttaaagatccctgcattgtaatcccattctaccgaaattcttctgtccggtttattatctgttaaagaatcgatttgttcgtatacggtattgacaacaacactaatatcaaatcgggatgttttattgtgcccgttcaaaatttcgatgtccgcatccagcaaagacatactttgtaccggaacgttcacaaaactaaacatgtattgaaataacggatgcagatttaaactcctttccggatttattctttctactacttttccaaaaggggtatcatcataagaataagcatccaagcaggtttctttcacctcgttaagtacctctgttaaggaattttcattgctaaacgtagtacgtaatgcaatcgtatttacaatcatacctaaaacttcctggaattctttataacgtctgttggcaacagctgtccctacagaaatatcggtttgattgctaaatttatgcagtactattttaaaggctgcgagcattgtgataaataatgatacgtcttgtttttcggaaaactgacgcagtttttcggaaaaatctaatgagaatacatgttctatcgtaccgccttttttcacagtagtttcctctctttcaaaatctaaaggcaacaacaatccgttagaaaaaccttcaaatttgttttcccaataatccaatttttcactaataacactttcgttcagactatttctttcccaataagcataatctttaaaagtaacttcaggcttctctgcctcaaaatcagggtctctttttaattcattataaatatcaacgaaatctctaaacaagattccctgtgtccatccgtctaaaattaagtgatgctcacaaaatacaagtacactttcctgatcggagaactttaataattctattctaaaaagtggtccttcttcaatttcaaaagcacggctctctattctttccagactatcggcaattactttctctttattttctttattttttattccggtataatcgataaccggaatggtatattcaaatggaggcagtattttttgataaggcttcccttcctgattcacaaaaacagttcttaaaatctcatgttttttgatcagttttgcaaacgtttcttcgagtgcggcaacctcaacaaaaccttttaatttcatggctcttgatacgtgataagaagtatcggcagtattcagctgatttaaaaaccataatctttcttgtgaaaaagacaacggatacaactcctgctcaggagctttaatattttgaacttcttttttgtttaaagtaggaaccagttcactgatttctttgatggtaggagatttgtaaaaatcccttaacgacaattcaattcctttttgatcacgtaaactactaataaactgattggccaataaagagtgtcctcccaattcgaaaaaactcacgtttacatcaacctgatccagacgtaataattcctgccaaattgaggcgatctctttttcttcgggtgttaccggcaattgaacagcttctgcaatatttacggttttaggttccggtaaacttttaatatcaatttttccgttaggaattaaaggaatagcatctaagattacaaaatgcgtcggaatcataaattccggcaaatgagcttttaaatcaattactaaagaagatatattgataaaagactcgtttgctactaaataggcaatcaaaataggcattcctccaacttcgttaatacacacataactgtctaccacgtatgcatttactttttgtatagcctgttctatttctcctacttcaatacgatatcctttgtaactaagctgactgtcttttctgccataaaaaattaaattattgtctatgctccactttcctaaatctccggttttgtagatacgctctccatttatgttgataaaggcattagctgtcaattcttttttattgagataagaaacggccaaacctaaaccggaaagtccaatttctccaatggcaccttttggtaatatttttgttccgtctaacaggtatactcctctattggtaattggtttgccgataggaaatgaagtgtctgtttcattcactttataataggtcgcacatactgtactttctgtaggaccataggtattgtagatatcataactcgctgtaagctgatctacctggtgtggttttaacgtatcgcctccgctaataatggttttaaaattaaaattgtaatttttatggttgtcattaaggtattgaagcacaaatggattcgtactcaacaaagtaattccaaaacgctcgcagtctctcaataattcattaaaatcttttgtatcagtagcaatcactaaattccctcctaccgataaaatcgggaaaatttcttctacagaagtatcaaaagcagtagaagcctgctgtaatacaatatcttcttcagtaagattaaagtaagtaccgaatgtaagcacataatcgtataaagaagcgtgattgataacaacacctttagcgtttcctgttgaaccggaggtataaataacataggcctcatcttcaggtttcaaagcaacaggaatatagttttccgctattttatgctcgtccagaatacgatctatattgtattctctctcttctgaaatagaattggaaaatgaatctgttaagataaaacctaagccggcatcttttataatatagtgttttctttcctccggatatgcattatcaataggtacataaacagctcccgtttttaaggctgccaaaattccaataatacttttttcagatctcgaaagcatcacccctaccttatctccttttttaacgccgctggactgtaaataggaagctatgctattagcacgtgcattaagggtttcataagttaaaaaattagtttgacaagaaaccgctgtttttgaactatagcccgctacagcagcattccaaagatttaaaaaagtctgttccggcctttttacaactggtccttttgaaatcacttgtatttcttctaactgttctttactcgaaatttcaatctcggctatagcaatatgattggtatcctgtaattctgtcaatacttttctgaaagaagcaatcagctgattggcttcaaattttgacacatatttttcattgatatcaaatctaaaactaagatctcccttgatcccttcaaaaacgtgaatagaaataggatcttcttcactgtcattagacaatgggtgtatacttgctttatgacccgaaaattcagattcgtattgcatgcgctcgtacgacaatcgtacatcataaagctttgaagtttcctgtggcagatttcgcaggatgtcggcctgctgaaaacgctgatgtctgtagcacataaaaagcgtgcttttaatctctttgataaaatcacttacggttgctgttgtttccaaagaaagttttaatggcaacatgctaagaaatggcccaaatgtatttttttcggcagcattttttcggtttaaaataggcatccctaaattaatttcttctctgttgtaatatttagacaatacgatagagaaacacccgattaacaaatgaaaaatgcttaatctttctgcttttacgaatgcccataaagcttcattttctgcttcggtaagtgccatttcaatattactgtgacttgccgatttattagtaccggtataaatcaaagaaggtaaattttcataacggcctaaccaaaattttctgtcattcgaaaaatcatctgaagctctgtaagcattgtctaatgctataaaagactcgtacgacattttgtttttctcaatacataactcatcatatacaacagcggtacctaattgttcatagattcttttcactttattgaacaacaactgaaacgaaaatccatctgctataatgtgatgaagtttcgaataccagatatacgtttcaggagctgtttgaatcagccacattttataaagctgtttatctttttctatatcaaaaggcactataaaatctttctctatcctttgaatcgctttggattcatctgactcttctatgcaggttaatgccaaatcactgtttgtttcctgaagtgtatatgcaggaaaaccactcttttcttcaaaaacaaaagaaaaaatatcgttctctttaatcagaatattgaatgctgttttaaaacgctccacatcaacacttccgttaataaatgcataaccaccaatattgtattttggtgattcattgtcaagtatctgatcaagccagatatatttctgaacatttgtgacattatttttcatcagtctgctttttataatttgaataaataccgaaaacgtaaggttatcgtaccattttgatttgtagtatggataaaaacaaccaccccctatatttcactacagagggaaattgatagtataataagatttatagggtatttttcctttaagaacaaggaaatgaggagtctgaaaactacgccttagcaaagacgttttctgctggattggataaatacgacaatggtattatggctgagatattctggcgtaatgaacttaatcgtacactgattctgtgctgattgtcgactctgaaaacttcacattccaaacctgatagttcaccatgctcgattttaagtttatcgcctatttttggcagtgccgattcgacttgaacatcggtgatgtctttcccctgggtgaagagtctgatataagcgatttcttcttcggaaactttgccatattctttgccgaaagacaagtacgactttaaaaaaaataaaactaaactataccagatcctaaaaaaagtgaccggattttgaagccacacatcacaataaaaaaggcgcaaaacttaagttttgcgcctttcaaatatcataaatttctattagaaaaatctgctgtgccagctatcggctgcaggaacttcccacgattcgttgaattcttcaatattgttaacgagattattaaaaacaatagtgttctcggaaactgatttatctttaaccattttcttgaaatcgattaaaggtttgtgtgcaatatgttcccccagtttaaaagtcacattcattttgtctaacaaatcaacattgtactttttctctaaactttggataaactccaccgaactatcgatcgaacagcctgttgccgcttgtacttcctggtttacagccaaaataatgaatcggttgtattttagctgatacgaagcctcaagacttgttccgtgtgccgcccattcttctacaaaagctttcaggtcggtttctatttcagaaaattcttcctcagaaaattttctgtttgattgataaatccaaactctggattcaccaggtaaattttcaaaaggtatatacattttaattttagattttagattggtgattttagattgaaaaagtttcaggtttcaggtttcaagttcaggttgaaaaacttagaaccttagcgccttagcatcttagaacctcaaattaaagatcctgtgcattcgcaattagctccgcaacatccattactttcacttgtccttctttttcctgatgcttgataccatcggtcaacattgtattacagaacggacacccggctgcaataatatccggctgtacttccaaagcatcttcggtacgcaatacgtttacttctttatttccaggttcggcatctttaaacatttgtgcaccacccgctccacaacaaagtccgtttgcttttgagcgcttcatttccactagttcaacatccagtttctgaatcaagtctcttggcgcttcatatactttgttagctctacctaaataacaaggatcgtgaaaagtaattttctttcctttaaactgacctccttctacggttagccttccatcatcaattaatgattttaagaattctgtatgatgaataacatcgtactgacctcctaattccggatattcgttttttaaagtattgaaacaatgcggacaagcagtaacaattttctttgcttcataagcattaagtacctcgatattcatcatggcctgcatttgaaacaagaactcatttccggcacgttttgcaggatctccggtacagctctcttcagtacccaaaaccgcaaacgatacattggtacgatttaaaattcgcacaaatgcttttgtaattttttttgctctatcatcaaaactccctgcgcaacctacccaaaataaaaattcaggctgtgttccctgggctagcatctcagccattgttggcactactaaactttctgacatcttcttttgttgttaaatcggttaattgtttatttggttaatcgcactctttgcgataaccctactcaaaaaccttactattttattccaatcgattaaacggttaaaccaataaccttttaaacttttatttctaattttcgtttttccaattcaaacgatcctgctggctgtactgccatggcgctccattgttttcgatattggtcatcatggcattcaatgacattggagcagcactttgttccatcaccaaataacgacgcatgtccataataatagacaacggactgatgtttaccggacattcttctacacaggcgttacacgaggtacaagcccacaattcttcaggtgtaatataatcgttcaataaggtcttattatccggaacaaaaactcctttattcgcatcgatgtttttaccaacttcctgcaaacggtctctcgtatccatcataattttacgaggagacaattttttacccgtttgatttgccggacatgatgatgtacaacgaccacattccgtacaggtataagcgtttaaaagctgtacccagttcaaatcctgaacatcgcttgctccaaattttgcaggagcagcattttcgtcaaccggagcagccgcaaacggatctgcgtttggatccatcatcaactttacctctttggttactgactctaaattatcaaactgaccttcagggttcaggtttgcaaaatacgtattggggaaagccaaaagaatgtgcaggtgtttagaaaaatataaatagttcatgaaaactaaaatacccgctatgtgcagccaccagaacacttcaaacaacagcactaccaattcattcgacattccgttaaaaattggtgctataaactgactaatagggaagcttcctgctttatgaaaaactcctcccggaacattttgcaaatgaagatcggaagcattcatcaataaaaacaataacatcaaaacggtttcgaaatacaagatgtaattagcatcgctttttggaaatccgtccaggtctttgttcacaaaacgctttaatcggattacatttcttctaatccaaaaaacggtaacagcaaaaatgaccagtattgccaatatctcaaatgacgcaattaaaacatcataaactacccctaaataaggcgcaaaaattctatgcgttccaaaaagtccgtcaataatgatctcgagtaattcgatgttgataattataaaacctacatatacaaaaatatgaagtattccagctacagggcgtctcaccatttttgactgccctagagcaatcaatgccatgtttttccaacgtgctttagaattatcttttcgatttacatctactcccaaattaatgtttcggatgatcttttttacgctcgatgcaaaaaagccaaaacctattataagaagtatagcgaataaaatattatctaaataactcattctgattattttttagtggttgtgttagcgtcttctgttggtgctacataaggtttgtttttctttccgaaaagcgaaacatttacataacgtgttgggtaaagacgaacatcctgtaacaacaattcaagctcttttgaagttttagccagattattatacaaagcatcatcattcaataatttacctgcagtaccttttcctgagttcaaattactcataataccatccactttagctaatgtctgatttaagtttcgaacagttttccctaaatctgctttgtttaaagaatcagagattttattgaagttactggacattttattaaagttgcttaccactccgttaatctgtcctttgttggtatctaaaatagtattgatgcttcctgaagctttatgaaactgctccatagtctgactcaattcagccaaagttttcttcagatcttcttgtccttttttatctaaaacgttgtttaatccagaaaccagattatcaatattgaccaacattttttctaatttcacctgaattggctcaattttcccgcccaaagattctttcagtcccggctcaacaaccgaagctaaagtctgaccatcaactgccagttctttgtctgcaaaattaggaacaattttgatctgtttccctccaattaaacttggagaatataaagatgcctgacttgttttagaaattggaaaatccgtttttaattgaagttcaactaataatttccctgttacttcattgattgtaattttagttactttaccaatcgtaagtccgtttatggtaacgggagctgacgctgacaaatcttcaacattatcatattctgcatataatgttttgtaatctgtaaaaaggtctttgccttttaaaaaactatagccccaaataaataataaaattgacgcaatgactaaaatagccgttttaatttctcttgttagtttcaaaattcttagtgtttgtacaaaattaatataaatattcgaactagaagctattatttaatggcgtcttgaatactgatcttttctccatctttggttgcaaccaaaaaagcagctccatatcctttatctttagcttcttccaaatattttttggccgcatcgtaacttgaagtttcctgatagaaatatttataaatattattttcgtacagcatggttacgtttttaagtcctttaaaatttttaggttccaatggtgtttttttaatactggcaataagctgtaccttaaagaatgtcccttttggagtatttttaactgccgcaggagtttcaacttcctttgtttttatcggagttgaagtgtcttttgccggtcttgaatctattatttccggaacacctgaaccaaaatattcgcttttataactcaaaattgcttcagcaatcgcttttgcaatatcattttgtccttcttctgagtttagaatatttccttctgttgggttggatacgaacccggtttctactaaaaccctaggcatataagctttatgaagtaccataaaaggcgcttgctttacccctccgtgtctcaattttttcccaagtttatcaaaattgtcttcaattttactggccaaagaaatactgttgtccagatattcttcctgcattaaagtcattccgatcattgattcaggtgaatttggatcgaaaccttcgtatttacgtttataatctttttctaaagtaattaccgagttctcttttttcgcagcttcaagattcgatgctactttactcaaacccattacataggtttctgttccgtcggcagctgtgtttttgtttgcattacagtggattgatacaaaaatattcgaatttgctctgtttgcaatgttggctctttcgaccaaatcaataaaaacatccgttttacgagtatatattacattaacattaggacttccttctaagattttacccacttttaaaacaatagctaaagcaatatttttttcaatacgtccgctgtaaacagctccaaagtcgtgatcaccatgtccagcatcaagtgttactttaaaaacatttgcctggctataagcacaaaaagacttttggtttataaaatggcataaacaactcgcgttgtctacgccatttactaaccaaacttaaattcttttaattctttgattattttttttagaaatttggagcgttaacatcccaccaaagtctggttcctccgttatccggaccacctaacttagctacaccagttgctacaccttctttattatttagtacttcatttgaagtaaagttgattcttctggctccaagtgcggtagaaatttttcctccactattgtttaccactacagggaataattttggatatcctgttcttctgtaatcagaccaagcctcttgtccttccgggaaacctgcaatccatttttgagtaataattctttgcaatttcacctcatttgtagctgcatcatcccaggcaatagtaatattgtttaccggagctgaattgtttacagcagcaacaggatcaacataggctacaggcaaactagtattatccgttaaatatttagcaataccagaagcttctctttggtcaaatgacgctccaatacctgcctcgtataatgatttagcatcacctcccatattccaacctcttaaagctccttctgctcttaagaaataggcttcagcggtagtaactaaataaatggttttagatctaaccacttctccaatacctgaaaaacgctcacggtctccttttcctccaatggctatacctgtacgaattcctttatactgacccgtaaattgagctgatttatcaaagtaaattggcattctagggtcgttgtatccttttaatatagactccatatcagcagacattctaatgtctaaccatgaaccactaatggtagcaatagggtttgtaaaagttggagatacaattctaaacgcatcttttttagctgtgaatactccgaatttttgtgctaccgctttttcagcctgagcttttgctaaagcaggttttacttttacgatacgcatcgctaatctcaaacgcaaagtgttggcaaattttacccaagaagcatagttaccttcataaccagataaatccgcatctttaaatacaaaaggctctccggcatctgctctttttgttaattcatctacagcaaaatccaactcgctaaacatttggttgtatacttcttcctgagaatcataagcaattggcgcatttttaccgtattgagaatagatgataggaccaaagatgtccgtaacacggtgcattccttctactttcaagataagagaaagtgcataaaaatgatcaaatttccctttagttttgtttgcaatatcatatgcattaaacataacagtaggataagcatttgtccaaatagcattgttccatccgtcaattaagtcataagttgtattgttacttcctcctctaaaaggagttggagtggccatataaccggaccaaatatctgcatttagattctgttgtaattgatactgagattcaagctgatctcctaacacctgaatgttgttaaacattggagcaaatccttttttgatgtcgttaaaatcatcttttaactgctcattactaaaaccatttggattggtgttaatctcatcaaaattacctgtacaacctaccgtagcaagtatcgacatacagatagctgtttttttaatattatttagtttcattttttttaatttagaaagttacatttaaattaagaccaatacttctggtagaaggtaaaccatagatatcaataccttgcaatccttctcctgtacttaatgcaatgtttggatcaaatggagcgtctttgtatataaagaataaatttctggcaattaatgaaatagaagctgtttgaaaaacaggaagttttttagggttgaaagtatatcctacagagatctctcttacacttacatttgtcgctttataaacatattcacctgtaattccatctctaccaccaacttttttataataatcctcagctggtatacttgttactaccgttccgtctggtttaattgcatttactggaactcctcctgcgtttctggcgtcacctgttgctttagaaactccaaagaaatcattctgagcttcagtcatactcataacattaccaccaaaacgtccgtcaattaaaacatttgcaaagaaagcaccaactttgaaagtgttagagaaacctaacatgaaatcaggatttgaattacctacttcagtaaaaccttcagtaccttgaattttaccatctttatctaataaaattctaccctgtgcatctttcagaatgtttttccccatgataacaccaaacggtcttccttcaattaaagagtattggtaattattaactccaggaacagtcaaattcactattcctttagatgaagcaggaagttcttttactgtatttttgttttgagaaaagttcacagatgaatcccatgagaatttatctcctttaacaataccagcatttactacaacttcaaaacctttattttcgatacttccggcattaaatccgtaaaatctaactccctcagggcttccgtccggcgcagcagattggaagtattgattttttgttgttgaattatagtaagaaagctcaataccaaatctgttgttcaggaatctccactctgtaccaaattcatactctgatttcaactccggttttaaagtagttcctctttgtaatccaacctgaggttgtgtactattattacccggaacgtataaatctacaggagtagtaacaaaagcagcaacatcattacccacctgagcgtaagttgcacgaacttttgcaaaactaattgactccggcattttgaacatctcgctaaggatacctgtcaaacctacagaagggtaaaaataggatcctttattcgtattcactaatgtagaagaccagtcatttctagctgcaacatctaagaacaacatatctttgtaccccaatgtagtagctgcaaatacagactgtatttctctttttgagtcgattgtctgataatttcctgtattgtttacaaaattgttaagtgtaaaccagtttgttatttttaatccggcaccaattccagaatctaaaattgttctgtcattcgtcatcgtatttgtaatactggtaccaatattagcattgaatgaaaaatcatcactgaattttgtattgatcgtagcaattaaatctccataacgttgcgtacttacagcatcattactaatgtatctaccattagcgtgagaaagtgttccttgagtagtagcaaaaattttcttttcaaatccactgtcaactctgttataactatatcttgaagcaattgttaaccattcatttgctttgtatgaagccgaaattgctccgttgaagaaagtgtttgtgtcttcagatttatttctgttaatagcccaatatgggttttgcataatatctctgttcgtcatccaattttgagccattaaatttctagtcggattaaaaacttcataattatttttataaaaattgaaatcatttcctcttggcattaaataaactcctgtaagtggattaaagtaaagaccatttaccggtttattggcaattgattgtgtagtataatttccggttacccccactgtaagtttgttatcaaaaaactttgccgtttgacgaattccaaagttatttctcttaattccgttacctggaataatccccgatcctgatgtattagcataagtcaatgctgtagaagaattttcagttgctgcagaatatcctacagatgtaatttgagtaactccggtttgaaagaaatctttaacatgatcttttatgttttgtttcgcaccccaagactcatcttcccctgttcttgcagcataatctttttgaaactttggcaaataagcagccgattcaaaagtcgttacagacgaacctgaaaaacttgactgtcctacttttccttttttagacgaaagtaaaattactccatttgctccttgcgatccatataatacagaagctgctgctcctttaagaaccgtcataccatcgtaatcgtccgggttaattaaagatacaacatctccaccatcacggttaccaccatttaaactaccaaaagtatcatttggctgacctgaaccagagtttaacattggaataccatcaataacatacaaaggctgattgtttgttgctgaagagctaccacgaatatctacttttgtagaaccaccggtaccggcagaactttttgttacagcaacaccagcaattttacctgcaattgtattgataacgttcgcatctcttacacgtgttaactcttcccctttaagttcctgagccgcataagttaaagattttcttgttttcttgatacctaatgaagttacaacaacttctgtaagtgcatttgatgccgcttgtagcattttaacattaattgtagcagcatcacctacaacaattgattgtgtttcaagaccaacataagtaaaaactaaagtctgtcctttttgaacttcaatcgagtacaccccgtcaaaatcggaagtagttcccttttgacctccttgtactgcaacggaagcccctggcaatggcattccatcagaatctgtaatcacacctttaatgctttttacctgagcaagcgaaacctgcgccgtaaaaacaatcataaagattaagaaaatttttttcatgttaatttattttgttagttatagggtaaaattattcttaagggattgttaaaaaaaataatttatacaaacaacattaaattttaaaccaacgacataaaacaatcaataatatgctattcgaaaacgttttctagccattttctggtaaaattttacaacaaaataaatatttactacaaaaaaaatcacttttattaaacaatcatttaataatcattaacatcttaagggcatttatagttgaattattctaactatatactgatatacaaaaagcttgcgagattcgaaaacgggtattacatttgcaccccgcaaaacatgggaagttcattgaaagattggtaaggagggaggttaaaaacgaaaagaaattttctaaaaaaaaaacttcaaaaaactcttgccgattagaaataagttttctacttttgcacccgctttgagagacaagcgaaacaaaaaaagaacacgttcgtagacatattgaattgacagccgtttcgatgaaaatcggaacaaaagaataagagtaatagaatcgtaagattcgaaaagaaccgatagatattcatcgcaatataatataaaaatatacgatgaagagtttgatcctggctcaggatgaacgctagcggcaggcttaacacatgcaagtcgaggggtatatgtcttcggatatagagaccggcgcacgggtgcgtaacgcgtatgcaatctaccttttacagagggatagcccagagaaatttggattaatacctcatagcatagcagtctcgcatgagatcactattaaagtcacaacggtaaaagatgagcatgcgtcccattagctagttggtaaggtaacggcttaccaaggctacgatgggtaggggtcctgagagggagatcccccacactggtactgagacacggaccagactcctacgggaggcagcagtgaggaatattggacaatgggcgcaagcctgatccagccatgccgcgtgcaggatgacggtcctatggattgtaaactgcttttgtacgagaagaaacaccccgacgtgtcgggacttgacggtatcgtaagaataaggatcggctaactccgtgccagcagccgcggtaatacggaggatccaagcgttatccggaatcattgggtttaaagggtccgtaggcggtttagtaagtcagtggtgaaagcccatcgctcaacggtggaacggccattgatactgctaaacttgaattattaggaagtaactagaatatgtagtgtagcggtgaaatgcttagagattacatggaataccaattgcgaaggcaggttactactaatggattgacgctgatggacgaaagcgtgggtagcgaacaggattagataccctggtagtccacgccgtaaacgatggatactagctgttggaagcaatttcagtggctaagcgaaagtgataagtatcccacctggggagtacgttcgcaagaatgaaactcaaaggaattgacgggggcccgcacaagcggtggagcatgtggtttaattcgatgatacgcgaggaaccttaccaaggcttaaatgtagtttgaccgnnnnnnnnnnnnnnnnnnnnnnnnnnnnnnnnnnnnnnnnnnnnnnnnnnnnnnnnnnnnnnnnnnnnnnnnnnnnnnnnnnnnnnnnnnnnnnnnnnntgttaactgacaactaaaaaatgggggattagctcagctggctagagcgcctgccttgcacgcaggaggtcaacggttcgactccgttattctccacgattttagtcataaagattaaagtcataaagttcaaagtgaaatactttaagacttttgactttggaccttcgactaaataaaagttcattgacatattgagataagaaaataataagaaagtagaaaaaaacacttttagacgaaagtcttaaagttgaaagtcgaaagtcttcgggctttatgactttagactttataactttagactaaaaaagtacaataagcaaaataagggcgtatgggggatgcctaggctctcagaggcgaagaaggacgtgataagctgcgaaaagctacggggacgagcacacatcgattgatccgtagatatccgaatggggcaacccactatgttgaagacatagtacaccgataggtgggcaaacccgctgaactgaaacatctaagtaggcggaggagaagaaaacaaaagtgattccgtaagtagtggcgagcgaacgcggattagcccaaaccaatgatgttacggcattgttggggttgtaggaccacgacattttatgtacaaggaaccggaattgactggaaagtcgagccatagagagtgatagcctcgtatgggtaacaagtataatagatagtggtatcctgagtagggcggggcacgtgaaaccctgtctgaatttggcgggaccatccgctaaggctaaatactcctgagagaccgatagtgaaccagtaccgtgagggaaaggtgaaaagaaccgtgaataacggagtgaaatagatcctgaaaccatacgcttacaagcggtcggagccctttagtggggtgacggcgtgccttttgcataatgagcctacgagttaacgttgctggcaaggttaagtgattaagtcacggatccgtagcgaaagcgagtctgaatagggcgctttagtcagtagtgttagacgcgaaaccgtgtgatctacccatgggcaggatgaagcgctggtaacacagtgtggaggtccgaaccggttgacgttgaaaagtcttcggatgacctgtgggtaggggtgaaaggccaatcaaactcggaaatagctcgtactccccgaaatgcatttaggtgcagcgttattttagttatatagaggtagagctactgattggatgcgggggcttcaccgcctaccaattcctgacaaactccgaatgctatataatgattgataacagtgagggcttgggtgctaaggtccaagtccgagagggaaagaacccagaccatcagctaaggtccccaaatatatgctaagttgaaagaacgaggtttgtctgcccagacagctaggatgttggcttggaagcagccattcatttaaagagtgcgtaacagctcactagtcgagcggacgagcatggataataatcgggcataagcatattaccgaagctatggattttgtagtaatacaaagtggtaggggagcattctaacagggttgaaggtgtatcgtaaggtatgctggactggttagaaaagaaaatgtaggcataagtaacgataatgcgggcgagaaacccgcacaccgaaaaactaaggtttccacagctatgctaatcagctgtgggttagtctggtcctaaggcgaacccgaaagggacagtcgatggccaacgggttaatattcccgtactactaattactgtgatggggtgacggagtgatgaaagcgccgcgaactgacggaatagttcgttgaagtacctagctatattctctataggcaaatccgtagagaatggtgaaatacgatagtactcggagtcttcggacaaagagatagtgcgcctaagggcttccaagaaaaacctctaaacttcaggtaattagtaccagtaccgtaaaccgacacaggtagttgaggagagaatcctaaggtgctcgagagattcatggctaaggaattaggcaaaatagacccgtaacttcgggagaagggtcgccccgagtaatcggggccgcagtgaagaggtccaggcgactgtttatcaaaaacacagggctctgcaaaatcgtaagatgaagtatagggcctgacacctgcccggtgctggaaggttaagaggagatgttatcttcggagaagcattgaattgaagccccagtaaacggcggccgtaactataacggtcctaaggtagcgaaattccttgtcgggtaagttccgacctgcacgaatggtgtaacgatctggacactgtctcagccatgagctcggtgaaattgtagtaacggtgaagatgccgtttacccgcagtgggacgaaaagaccctgtgcacctttactatagcttagtattgaccttggataaatgatgtgtaggataggttggagactgtgaagtggcgtcgccaggcgttgtggagtcattgttgaaatacaaccctttgtttatctgaggcctaactcttcgatgaagaggacagtgcttggtgggtagtttgactggggtggtcgcctccaaaagagtaacggaggcttctaaaggttccctcagtacgcttggtaaccgtgcgtagagtgcaatggcataagggagcttgactgagagacatacaggtcgatcaggtacgaaagtagagcatagtgatccggtggttccgcatggaagggccatcgctcaaaggataaaaggtacgccggggataacaggctgatctcccccaagagctcatatcgacgggggggtttggcacctcgatgtcggctcgtcacatcctggggctggagaaggtcccaagggttgggctgttcgcccattaaagtggcacgcgagctgggttcagaacgtcgtgagacagttcggtctctatctactgtgggcgttagaaatttgagtggatctgattctagtacgagaggaccgaattggacaaacctctagtgtatctgttgtcccgccaggggcaccgcagagtagctacgtttggaagggataagcgctgaaagcatataagcgcgaaacccaccacaagatgagatttcttttaaggatcgtggaagatgaccacgttgataggctatagatgtaaaggcagtaatgtcatagtcgagtagtactaataatccgtaagcttatgtacacccttttccctccgagcaatcggagggaggaaactttcttaacaaaaaaacttatttgtttctttatctcagtatgttaaaatattgtccgcacgcggaaagtgactagtgaagagtggctagtaaagagtctaaggactaattactaagggctaataactaattactaatgaccttaaggtggttattgcggcggggctcacctcttcccatcccgaacagagaagttaagcccgcctgcgcagatggtactgcagttatgtgggagagtatgtcgtcgcctttcttttaagaaccctatccaaatcggatagggttttttgttttataacgtttttttgattacgatcaacgaattcttcagagcaaggattaaaaaacaatatcttttcaaaatgcaaatcatttttttctacagtactttttttaaaattattcaataaaatttgaataaaacaaaaattctttaatcgatcatttatataagacgactccctaaatttaaaaattcttaaaagtacttccataatagaaaaaacatcttcaaaaacactcgggtcaaaattatctaattctatttttttagacaaagtctcattttttagcaaatataaaatttcttcaaaatcaagtttcttagaaaataatcctaaagaatatacacaatttgcatcttgaaaatttgacaacttccatcgtttgctctctaatgtttcttttttacccgagaacctcaaaatattgaaattcaaagcttcatttatatacatgaattacttacatttaatagatttaacttttttccagttaccctttttgtcttttttaaatattgtaatcgacttaattctttcattaaattcttttaatttgtccacaccaatacctaaggctcctttttcattgtctttagttaaaatcttgttcatatttttactttctccaccaaccatttcatcataatttaaattatccgttttcaagaaatcgctggtactgtcatccatatcaaaaataactttatggtttgaagcttttgctgtatcgtatgggtcaacagcttgtgaaacccactttgctcctctggaattattagctcccctaactaatcctttattgtcacttgttaaatttgcttccatttcagacattgtcctaattatttcaagtaaaccaaatatatcaacccaggagttactgttgtgaacatatgcataaaaatttgggttatttccatgtaaccctattggatcctgacttatatatcctccaatttcatttgaataatacctaaacctattatagtaaagccctgtttctatatcctcatactgtcccaactgcctgaaagggataaaacttttatctcctgttaaatcttttaggtcaccataaatatcataattggtttcccaaactaactcgcccgtttcattataagcttgtactggtctaccaatataatcattgataatcgaaaacttttccttgccaacaattttagcagttggaacaaacgaaccttcctgatacacccaagtgattaaattcttaatcggttccggtttatcatagagtaagtcatccacagtggcaattaatttaggacgatcttttaaatcgtactcccattcgtgagtaagaacgtttccatcccaaacataacgattaatttttgggtttgcaatttttgcggtgcgtctgcccaaggcatcgtattcaaactgtactgtttttccgtcggggttggtgacgctttccagcatgccattggccagccaattataggtggtgtctccattttgccattgcttatgttcctgctgtaatctgttttcttcgcttctgttacctgccagtttgtcgatccaattggttggttcttcaaactttagctcctcattgatgtttctttcacttttgtgtatcagattgccaagctcatcatatctgtaatgatacttttcgtcctgtaacagcttaccacctttaccatacttacgatcactacgatcgggagttttgtataagttacctaccgcatcgggagttttataaagttcttcgtttccattatagcttttggccagattgccaaagtcatcataatcaaaataagtgatacttgaagttatttggtttacaacactacgtaattgctgattggtgtcccagttgtaaaaacgtgatccggtgcgtttgccattcgcaaatacttcctgctctttttgtttcccgccgttgttgtaactggttttaatgtgcagtcctcctgttgcaaatcgctctatttcacgtcctaattcatctcgtttcagggtggtttcccacttttgatgctgttctttaagttcgttgctctgggcttctattcgctcgagctgccctttttggttgtaatgggtattgatttcggctccaaggctggaagagatgttggtacgttgtcctaaagcgttataggttgataaaagtgttatgccattttggttggcgtcgagctgttgtttttgagtttcttgtatgatacgccctaccgcatctcgctcaaaataaatgcttacattttggttggtagcttcaatgagctgtccatttttgttgtaaccgtacgtttcccaattaccgtcgtgataatccgctctggtgatacgtcccagtgcatcttgttcgtattcggtaaattttccattgccatgatctattcgggtcacttcacctgccagattacgctggtacttttttacaataccatcaaaggcagtttcttttataatgtgccctgctttgttacgagcgaaataataaacttcgttgtcttcgtttttaatgccctgcaattgctccatcttgtcataatcaaaacgcacttttacgccattctgctctcgagtagcaagacttcccatcggggtataactgaacttaatattgttcttattgtcttttaaacctattacttcatcataattgttgtaggtaaactgtatgacattactgtctttctctacaatctgtcttaccctgtccaatgcgtcataactaaagtaatccgccatttgtattggggtgtagatagcctgtacgcgtcctctgtggtcgtactcccatgatttcaacttttcattattctcacgccactctataaggttaaattgctcgtcataaatcaattctagtttgttattgtttttggcaaccgtagccaataatccattatcatgataactaaaatgggtagtggttttatcaggagcaataattgttttgagctgatcctccctttctcctttatacagataaacagttttattgccttcaggatctatggctattgatggacgattttcctcatcgtagatcatgatttcttccgtaccatcagggtaaactgtactggttttgttccctctgtcatcgtaattaaagcccaagatgcgtccttcgggatcaatctcgcgatagagttccataaactcggtataattgtaaaagatactattacccatggggtcttttacttgtgtaacgagttgacttggctcgtaataatatgtagttacagctccattggcatcagtgactaaattatagccttcttccgtatggtagtcaacccagccttcctgccaaccgccatcaccccaagtatgggtacatttgttttgagtatcatactcccaataaaaagtctgaccgttacggtcggtctttttaatcatcagatgattttcatattcaatggttgttggtttttgaagcgcatcaataatggtacttatattaccctcctgatcgtactcatacattactaaaagttcctcccgttcgggtccaataagttctagcttttgaatgaatccttctttattgcttactttgatgactctgcctgacgaatcgatgatcctgttcagaatatatcctttaaattcaaaaatgacagaaagtccgccaggattggtaatttgagtgagctggtatttcttgctgtcaaaaagggtgaaatgataaaacagtttgtttgtatgatcgtaagccagataaccgtcctgagtccttttcagggttgttttttcttcacggagataaaattcttcttcgggcatcaaagcaggaaaagcaaccaatcgtccatcatccatacgaagtcccaccgcatcgtcttcaggatataattctactgctctgtcgtatacgcaatgtacaccatgacccagccagcctacataatcagaatcggagtaccaagtacgttgccaatttaaagaaattggattggcaatattaaaatcgctcccttcataaattacggcaccattaattaagtttataggttcaaagccaaaccggcacaagatttttttgagacctgctgggcatttaccactcgtattgaattttttaataagacctctcgttttcttcaatagcgtactaaagccaatactggcaaccagtcctgtaatcattcctccccaatcaggtggatatggtccaccaaccattacaggttttcctgttgggatcggcaatgaaaatgaagttggggcaaaaagcgttggagcaaacggtaacattttttttcctactttggtttttcccaatgacatcgagagcggaattccaatatcattacaagtcatcagcatatgccctttgggactcattctggtaccgtctgaaaatacagtttgtgaggcaaagaagttcatactctcgtgtccgataataggcatcatcaaccaaggtggtgtaaaaagcggaatatgttgcaatggaataataatacctcctgtatcagaattcccgcgtttaaaaccatttacatgtaccgaagtacctaaaaaaggaatgtaatcagcaggatcaataacaatccctatataaggatgaaaaggattaaatggcggtaaagtagtaaagtggatgtcaatacccacgactatggttaaatgattatcggttaataacataattgatgatgttgcttaagtggtattcctcatgtattttgttaattaggatacatgaaatctcataacttcaaatatattacaaacaatacttacaaaacgaatatttttgtactatttttaccaataaaacaaaaataacacacagacataattagatagcttcttatattattttttttgctcttgcattgataattttaggtttatactttaagtaactatatttgtgggagagtatgtcgtcgcctttcttttaagaaccctatccaaatcggatagggttttttgttttataacgttttttaaatctttgcgtgctttgcgtaaatcgtcgcgctctttgtggttaaaaaaaattacacacggatgatacagattcgccaggcgaaaacgcggattggaacggatttttttttgatttgcagaaatgaaaattgcttttgccctttcagggcgaaaatgacattatttttatttatttcatggtgctttgcaccatgctcttgcttttcgggctttcagcccttttttcttgcgtgctttacgtaaaccttcgcgctctttgcggttaaaaaaaataatacacggatgatacagattcgccacgcgaaaacacggattggaacggatttttttgatttgcggaaatgaaaatggcttttgccctttcagggcgatagttgctgttcattttggttcagatatagtgcctcgcatcatgctttttgctgttggagttttcagtcctttttccttgcgtgctttgcgtaaaccttcgcgctctttgcggttaaaaaaaatagtatgcgaacgatacagattcgccaggcgaaaacgcggatcaaaacggatttttttattggctttagatggcttttgccctttcagggcgatatttgctgttcattttggttcatacatagtgctttgcaccatgctctctctgcttttcgggctttcagcccttttccttgtgtgctttgcctaaaccttcgcgctctttgcggttaaaaaaaataacacacggatgatacagcagatttttatgtagtagttgttaagggctaggttgttccttttgagattaggcttttgctcttttagagcaatatttggcataatacttttaaagattaataagggctgaaagcccgaaaagcagagagcatggtgcaaagcgctatgaaataaatagaaataatttcattttcgccctgaaagggcagaagcctcgacataaagagaggaatttctatgattttgaacagcattttctggaaaagatcgatttttcggtattaaaaactagtaagaattggttttcttttgccctttcagggcgatagttgaggctcattttggttcatacgtagtgcctcgcatcatgctctttgcttttcgggttttcagtcctttttccttgcgtgctttgcgtaaatcttcgcgctctttgcggtaaaaaactttggtgcctttttttctttaaatattctttttattgcagtatgcgttagggatgggagtgatatccttttgcgatgaccatacatttaaaaaatccctgaaacttctatcgcaaaagatttagcggacagcccgacccaaagaggaacgccataataattgttatttgcattagatttgaatttagtttgttattggaaaaccttggtgtcgacatcgtttataaactgaattactccattcatgaagattttttgatcgtcccacatggcgagatgacttccgtttgggcaatagagataacgtccttttttgactaatttgctttgttcttccatagctttcggatccatagtgtcatattttgcgccaatcattaaggttgggatcgtaatttcgcgtaagcggcttttaatatcccatttggctaaacgaccactgatgccaaattcactcggcccctgcattaaggtataaatttcactattgatatgcttgctggcacgattgagtccatccggccattcttttagtctgcataggtgtttttgataaaaatttggaaggagtaattccatatatcgtgggttgctgaaatcttttttggcttcaagggctctgatttctgccagtacttccggtttcatttgttttgaaagtacttcatcggcatattttccgtaatctggcgcactggccatcatgttggatacgagtaaacctttcatgttttgttgatatttcagggcgtattccatggctaaaattccaccccatgagtttccaaggacgtaaaaattgttgtgattggcaccgattgctttgcgtacttgttctacttcttctacaaaacgttttgtagtccataagctgctgtcttttggctgatcgctatagtaagaccctaactgatcgtattcataaaactcaaatccttcgcgttgaaagaatgtctcaaagcattccatatactcgtgagtcattgcggggcctccgtgaagtaacagtatttttatttttggattgtttccaaaacgttttgtccaaactttaaattctccaacaggggtttttataggtatcatcctgacgccagctgatactacttctgactctttattgtaggtaaagtagttggataatgaatcggttttagattcgtttttgcaagaaatcagcagtaaaaagacaagaatggcaatactataacgcataattttggaattagtgattttgaacattcgtttctgattaaaaatacgaatttatttttgattgggctcaaggagaaattggtcataagatggattgagaatttattaaaaaactcttaaatcattaaaggaatgaaagtgtggaaaaagtttatatttacaacttgtttgtaattgccgtaagaattcaagtttcctatcagcgaatcatgctgaattagttaactgtacgattaaaattcaattctttttttgttactatgaatgtactaacacttcctgacgagttaaattttgatcaatcaaaattgatccacgtctatgattatactagttcgaaaaggatttctaaacagcagattattctgaatcagaatgtatttagttttttgatgggagggacaaaggaagttgtttttgataattcggctgtatcgatcgatgcttcgaagtttcttattatgaaatcgggacattgtttaatgacggagaagctttcagatttgtctaactatagaagtgtcgttttatttttttcgaatgagattctgctgcgatttattagaaagatggaatggagaaagggggaagttgaagaatgtaagtctgtccgtgcttttgaatatgatgtgtttcttaagcggtttgtagatagtttggttgatatttcaaaactttcgattgagattaaaagtaagttgctggaggttaagtttgaagagttaatgctttatttggtgggaatgtatggtacagagtttttatattctttaacagtagacagtgatgattcttcgcaaaaattttttcagattattgaaagcagtcatcttagtaaattgtcattaaaggagttgtcttttttgtgtaatatgagtatttcgacctttaaaagggaatttgaaaaacattattcggaatcacccattaaatggtttcagcataaaaggcttgagtttgctcattatttacttcatcaggagcaaagaagtccttcagaagtctattttgaagcaggttacgaaagtttatcaagttttactcaggcttataagtcaaaatatggagtgacaccaaagcaggcacagaaaaagtgagcttttggctatagtttttgagcctttgtctccatttactttttattttcagggttaaatttgtttaaaatcttaaaccatagaagaatgaaaaaagtaaatgcaattttgataatgtccttaatttttaccacaacaattttcggacagaagacttttacactaaccagtaaagatttgggaggtgagcttactaaagtgcaagaatttaaaggatttggctgtaccggagagaatcaatctcctcagttgttttggaagaatgcgccagccggaacaaaaagtttcgctgtgacgatgtatgatcctgatgcaccaacgggaagtggattttggcattggattgtatttgatattccttcagatgtaaacgaactgataactaatgcgggtgctaaagataaattttcgataaaaggtgctgttcaaagcattacagattatggaataaaaggatttggggggccttgtccgccggaaggccatggatttcatcaatatatcattacggtttatgctcttaaaacggataaattaggacttgatgaaaataccaatccggctatcgtagggtttaatttatggaatcagactttggcaaaagcaagtattgttgcttattataaaagataattataaagtgatgttgaaattataaagcaggatgttctgagcatcctgctttttttatgaagcattgtattaattaatgatttagtttgttgtaatcgcggtcagtgataatgttaatagaaatttgtaatatcggcacataactatcggttacggaataagccaccagcatgaaggcaaatgttcctgcattggtttgcggattattggtttgcatccagctgtttattccttctgagatcatatcggctatatcttttccatgatcggcaacggtcagtgtggttggagtcaccaatactactggcacatcttttaagaccatttgctcccgtgctgtcaaaacgaaccatccatagcggtgcatttgcagtggtgtcactatttgcctttggtgggattggctccggttgcagctttaagtacgatgcccgtgttaggctgattgatgaaagcaactttaaattgctctgcaaaataggtcagtgccagcataccgtttacaccgttttctgatagaggccgtataaacacatagagacattggttttaagagatgtgaaaagagtgaagagtgaagagtgaagagtaaagagtgaagagtgaagagtgaagagtgaagagtgaagagtgaagagtgaagagtgaagagtgaagagtgaagccattctttaaaaataaaataaatgaaaaaattagttttagttttattgttttgttctactgcaggttttgcccagcaagatgcgcagtttacacaatacatgtataataccatcaatataaatcctgcttatgccggttctcgcggagctatgagcattttcggattgtatcgcacccagtgggttggattggatggagcacccgaaaccagtagtttttcgttaaatacacccataaacaataatgtaggtttaggagtatcgttagtcaatgataaaataggccctacaaatgaaaacaatctgtcagctgatttctcttactccatacaaacatcagcaaccgcgaaactttcttttggtattaaaggttctgccaatatatttaagctggatcctacaaaattgactccggagcatcagggagatcctcagtttcaggattttcagaataaattcgctcccaatatcggagccggagtttactggcatacggataaagcttatgtgggattatccgttcctaattttattcaaactacccgctttgacgataacgattattcaatctataaagaccgtatcaactattatttcatagcaggttatgtatttaatctaaatcgttatgaaacgataaaatttaaaccggctataatgacaaaaatggtcgaaggttcaccattacaagtagatgcatcggcaaattttatgttcaacgataaatttgtgatcggactagcttacagatggagcgcctcttttagtgctttggcaggatttcagataaccgatagtatgtatgtagggtattcctacgatcgcgaaaccacccgattggtaaactacaactcagggtcgcatgagatatttctgcgttttgaattcttaaaaaattacagccgaataacttcacctagatttttctaattatgaaaataaaaaaaatagcatatacggtctttctgtcttccgttttttttagtggaatggcacaaaagtcaggtttagacaaagctgataaaaattacaatcagtatgcttacatagatgcaattgctacttacgaaaaggtagcagaaaaaggatataaagaggaaaaaatgctccaacgattgggtaacgcctattattttaatggcgagttggtgagagcattaaaatggtacaaagctcttttcggaatgaatgatcaacaggaatttgagtattattaccgatatgctcaaaccttaaaagcaacaggaaattatactaaagccgataaaatattagagcttttcaaccaaaaagcaagtactgataaaagaggattgttatttgaaaagaataaaaattatttggagcagataaaaaacaattcagggagatttgaaatagccgatgccggaattaattcaagatactcagattatggaagttcttttttagataataaattggtatttgcgtctgccagagacacgggcggagttgccaaagtaaaatttaaatggaccaataaatcgtttacaaatctttattcggcagaattaaacgccgatggtagtgtaggaattccgaagcgatttgaaaataagatcaattcaaaatttaatgaatcgactcctgtttttacaaaagacggattaacgatgtattttaccagaaacaattttctaaacggtacaagaggggcagacgacaagaaagtcactttattgaaattgtataaggcaagttatatagaaggtaaatggacgaatatcgttgaattgccttttaacagtgatcaatacagtgtggcacatccgacattaagtgtagatgaaaaaaagttatactttgcttcagacatgccgggtacttttggacaatcagatttgtatagtgtgactattaatacggatggcagttttggtaaacctgaaaacctgggagccgcaattaatactgaaggaagagaaactttttcttttatatcaggagataacgaattgtattttgccagcgacggacgtccgggattaggagggcttgatgtgtatgtttcgactattaaaaaagatttgacgtttagcgaagttcagaatgttggagctcctataaatacaaaagtggatgattttggttttataatagacagtaaaagcagaaccggttttttctcctccaatagagatggagggcatggttacgatgacgtctaccgtttttcggaaaccagaaaattgccttgtgaggagattttatcagggattgttatagatgccgaaacaaatttggtactggaaaacgctaaagtaaatttacttgacaatcagcttcagataataggtgaggtaataaccagagccgatgggaaatatagttttaaagttaattgtaataaggaatactttgttcgcgcggcaagacaagattatgatactaatgaattacctaaagcgatcgataaaacaagtttgacattgcctttgaaaagaacacctcaaaaagtggttgaaaaaacgattgaaaaattgattgttggtgatgatttggcgaaaattttacacataaaaatgatttacttcgatttgggtaaatctattgttcgaaaagaggcggccattgagttagaaaaaatccgtcaggtgatgattcaaaatccaagcatgaaaattgatgttcgctcgcacacagatagtagacaaactcatgcttataatgaaaaactatccgacagaagggctaaagcaacagtggcatggcttgttaaaaaaggaattgctgctgatcgcattaccggaaaaggatacggagaaacacaattgctgaataaatgtgctgatggcgtaaaatgtactacagaagaacatcaggcgaatcgaagaagtgagttcattattgtttcgatgtaataaagagttagcttttttaataaagttgagttaattaaattgttatgaaaagctgcagggtaatcttgcagcttttttttgtgccgtacaaaaagatttgttttttaaggatagagataaaaaatgattgtatttaatttcttaaatttattctattaaatgatctggagagaagattaaacagaaaaaaatcttcagacccgagcgatagcgaactggcgaagcaatctgcgtgaaaacataaacccaacggtatctaatataaaaaacaataactttgagtacaacagaattcctaacccgacttataatcgcactcttcgccggactaattattggtttcgaaagacagtggcaccacaaagaaaccggtttaaaaaccaatatgctggtagcaacaggagcagcagcatttgttttattgtcgattaaagtagctgcaacagcacccaatattgatgtaacccgcattacagctcaggttgttatgggagttggctttttaggtgccggagttatatttagagaaggacccaatgtacacggtttgaattcagctgctactatatggtgtagcgccgctattggctgtattgccgcatcaggttatttcatagaagctctaatttgcacatttctagttacaatcgtcaacacagttctcgaaccaatcgaaagatggcttcgaaatcgaaaataaagaccaatcttaactgtttgttagatgtaaacactgtttgcagtttacagtcacagtttacagtttacagtttatagtttacagttacagttacagttacagtttatagttacagtttagagttacaactcataacttataatccataactcataactcacatctcctcaccacttatttcaaataaagtactatttattgcatcattactgctgcttgttgattatgagtaattagcagtaaatgagtgtgttaaatttgcatctgaatttaaagatggagtaaatatgagaatgataattttgagtattatttggttagttccagcagtagtaatgtgccagactggtaccccaaaacaccagatagatacgcataaagaaatgtctattatagcatcacgtttagatctaatttgtaaaagtaaagaaataatgataccacgaacaacattaaaaagcagatttgacaagtctacagttgtagacggagataccaaatttattttggtttttaataccgcaaaaaatacacaaattttgccaggttattattattggtatgaaaacaaatggaacaatctcaaaaatctgattgaagaagacggtttacctgaggataatggaaaagcaggggatctcttttttgactattctacaaaagatgtgtatttttttaatggatcgatgtggctttcaatgacaacaagtgattacactttttacgaggcagtatttgaaaacaaaagtggtattttaaaatataaaaatagcttaggggaaaaggttgtaattgatcttcctcagttagtacctaactttaattacccaaaaacaatttcactgaatgcgggaaaagaaaccctcaattttattgacaataccggaaggcttaccgttgtaaaacttgatattttactggagaaaagccgaaatacaaatgtaacctcaatattttaagtaaagccaattcataagaatctaattaattatatcaaaacccgacaggtttcaaaaacctgtcgggtttgttgttttataagtgatttgtatatctgtgaagcgttagatgtgaaatgcaaactgaaagacaggaccattatatttctaaaatgtggaaacaatccgatttctgtcttaatagtacaaaataataaatcattttgtttttcaaaataatattttttatcgaattctatatttgtaattgccttttgcaaaaaaaaatagtatttatctattgtgttcataattagttagatattaaatcaccccaattacttgcggctttaacagtactatttttttcaatttctgtgctaaatacttgtttaccgcctgcttttccagctaaatcagttgtactatttagtactttgataggcttggttaaggtatattcctcaataatataattttgtgggttattcatagcatctaattttccaagtgcaccaggtaatgtaaattcttcagtaaagaaataatgttttggttcagtagcacctttttttgaatacctaaataattttgaaccagcttctaaaatttgtgtataaactggcttttcaaaatttactgcttctaaatgtttttcaatattacttacgccaaactagctaaaaaaacttttagctaaattagttctaatttccgtaatagattgaagggctctaggctttttaaaagatttaaaaggattactaaattaaatctcatcgttttcaccgccaattccatatttcgcagtttgccaaactgacattacttcgaatgttgtattgtatacagatttcactgctccaagattttcttcagaactagcttgcaatattggatatttcaaaataggttttccttgtgttaatcttccaacatttatgaatccttcaataaaatctaaaatccttaatcctaaccaagttttaacagcatcggtttcttttatagccttttctttttcctttaccaaagtacttgtctctaatccttctaattctactgacattataggcgagtttgaactaaaatgatatggactataaaatggatatttatgagtaagtgggtcaattgtaaaaaacctacccaccctcgggtcatgcatcctaaaggtataatttaaggagtttccttcaccttttaactcatcgtctttctcctgtccttgaaaaccgtatctgtagctatcactagacccgtgtctattcgggactaacattccaaaaggatagtaatctgagaagctcagaacatccggattgaaactatagttttgcccgttttgtgcgaacaaaggacggtctgtaattaccgaaagaacgtttcctaaatggttcgagaactcataggttttatctccaacaaaacggtaagaggtcaacggacttgttactactgatccatctccttctccctggtctaaaccttcacaggcatctccaattccatttttattgacatcttcttgtaacgggttggtttttgttctgcaattatcacaaacatcaccaaaagaatcttcatcagaatttatctgatcaaagttaggtgtttttacgcaattatcgcaggcatcacctacaccatctttatccgtgtctgtttgattgccaacaccaggaacgtctttttctgccagaccatttgctattgcaatacaattgtcgcatacatcacctacaccatctccatccaaatctttctggtcagggttaaaggtgaacggacagttgtcttgggtgtttatacgaccatctcccgctccgcaaagtatacctcacagacactgtgtaaatgtctctgagtttgcgccaacttgtaaacgtctagtttaaaacacatgaaccataaagtctcagactttaaaaccaattatctataataaaaaaaccagtgaattaacttcactggttttgcaattatttttaagaaatcatcccctattttaagatgacttataaaactgaatttatcttgtaatgccaaacatcatgaccaatctatcgttaagataaaaattaagcgtttgatcggctacatcaaaacgtaagtctttattgtttaaataatacagcattttttgctctgttttgtttccttcttcaccaatgcatgccattcttgtagacgctaccttatcaaaagaaatacgatcaccggtagtttcataagttccaaagaaattgttgcagcctgtacttccgctcaccttcttttctgccggattaaacttaatagaagcctttccgtaatcctgtccaacattttcaagtgcgattagtttccaattgttttttgcaataaaactccacagttggttttgtgttggtatagaaaattccatcaccactttgttcttcccatttctgaactgtactttattgtttttctttacaattttgaactttttctttgttattgcagcgctaaagtcttgttctaatttcatgccttcaccttcacaagccattaaagttccaaaaggagcatcggtcttaatttgattttttgcagaaagctttgtgtactttacattgaagatattacatccgttgttaccgtttattgtaccagattcgtcattaatcgtaataaatgctttcccgttagttatcttttttccgtttaactgggtcaagatcattttggtattgtaaattcctttttcggcatttacaggagttttcgaaacaatgcttttcagtttgtactggtatgcagaagcatcggcaggaataggctcttgtcttttggttcttgttaccaagatctcatatcgatttcctttttcaaaattaaaaccttcaatatggtcgtaaaatagctgccattctttgtccttgtcatactttacctgcagacattccatagggccaacacccatacaggacactttactttcttttacaaacatttttaaactttcctgaccatatgtaattgttgataataataccgctacaaaaacataaatacatttaaatcttttcattattttaattttttagaataccgattaagcattcagattattcattgttttctttccaagcacgaactgtgccactttaaaataaagaacgtttttaacttttttttatcacatcccctgctctgcaaagcgcaccttaaagctaccgggtaaagatcttaatttagttactccataatcgttctctcaatactacctcttctttctgcagtaccaatagttttatggtatattgctcttgtatcagtacactgtttatcccacgccgacaaatgtctctgactttgcgttctacttactcaactctcccactcgtgaagatttatgaaagaaaagtgctatttttgaaaacaaaaaacattgacattcatcagaccaaccaaactaatttaaagtaaataagtcggacatcgttacaaatatatccgcgttaagagtaattttatgaaaaaaacattctattatttattaatagtaattacaacgctttcttgttcagaaaaaaaacataaacagaaaacattacaatcaaaaaaaactaaatccgattcggttattaaagtagatgatgctctattagaaaacaattcagattgtgtatttgatgacaattacaaaaaaataacagaagaatggctaagcgaacttgaaatcaaaaaatatgtttgggattcaaaaaataatagagcaacactggtatttaatggtgatactttaactgtatataaaggtggctgtgaccattttgtcagttcgatagaaattaaaacagctatttacactaaaaaggaatcagacagtgccttaataagaaaaatcaatgatgtagcatgtaaatttaaatttaataattattgtaaaaagcttattgaaggtcagtttaaaagaattgacaatagtgattcatcatttttctttgaatttaaagatgatgatccagaagataatttaatctctgaaggtatagagatctttctaaaagaaaaaagcacaattattaaaatatcagagtattataattaaaactactgctaaccaatcaatatcaccccgctctgcaaagtatatcattaaaaaaaataacactttgaaaaaatccatttatatcttttgtttaattttaggcacaatagttaactgtaactctcaaaatttattctcagaaaataaaaattctaagaattcaaaccagaaagttacgctatctggcagatggcatattgacaaccttatagaacaggatgatgactcagaatattatctttctaaaagcaataagaatagcaccggaaatcatttgatactaaatgctaacaatacatttatgagtggttattctgctccatgcggtaacgattgttttaccagaacctacggcaagtatactcaaaatgacaataatcacattcgtttctttttggaaagaattgaaaaatcaggcgaatgtacaggggactcaaatccaaatcaggataaaggattattttttatttatagcgactccacgggtacaaaactcattaaaagtgatggaaaaattaaaaatgatttacgtaaagtaaaatattctgctttgatagactctatcaacctaaggaatcaggtacgtaacctgtattatttgaaatggcaggaaacaagtaaaacaggaattaaagaaattgcttctgaatttattaacagtaatcctttgttaaagcttgataatgcaactattttatattcaaaaaaaataagacaaatgtttactatgactcgctaagcttccacttaccactgcattagcatcactaatggttactggagccagggttacgtttcctgtgttggtcactgtaaaagtataatcgattctatcaccaacgtttacgattccatctgcattagcatctacgtaagttgcctttttagctacttcaatttttggtgatgctataaaaataaccgttaaagcatctgtctttgcattattacaacccacaccactaggcgttccgtcacattccacatcagcatctaccggaggtgtaccgatatgtgtatctgctgtcgcgtccggatctgttaaatctgcgggacgcataatcgttgcctttacagtaggattacttccagctgctgctaatacttttgcgacaattgtgaatgtaatcgtagcgtcttttggtaagtcaaccgtagcatcaagcacaccgccggtaatggtatgcgtggtaattgctccacctaaagtagaagaagaggtaaacgactgaaccgctaaatttgcgcctgaagctaagtctgagaatttaaactttgctccagttacattgtttggtcctgcaatattttttacaacgactgtataagtaacatttgatcccacattaccactaaccacatcactaatacttgttaccgctaaatctgcctcattttgtacaattggtacagatattggcggcccgggtgtagtatacacataagcccatgtatccagtaattgtaagtctccataccctgaagaacgagacgaactagtagtccatttatgtgtaccagctaaactactattgtttaaggtacgcgaagaagcatccaacaaatttggaggaaatttatcggtactacccgtatctgttccaatcggcgtatcgttccaatacacattactattaggatccggtccattcgatctggtaataataataccgttcgtatttcgctcggcgtctaaatatggaaagtgtacctctccattgaaaaggacgatacttaatttcaaactagtattattggttataggattacgtgcaccatctctaccatcccatcttactttattcgcacccgcaatagcagtacctgttaaagttacatctatggcatctgtcatcaatccatttccattaacatcaatttcgataagataattagcgttaacagtggccgtaaaattgataaaagctcctagaggataaactcccataccactggttccttctactccatttaccgaaatagctgaaatagcttgtgcaacaataggcacattcaaccaggttgtggaagctgtgctccccggaaaaaaaataggtgcagaagccggtaagcttgcgtctggcagattaaaaaatattttggatgtcgtattggttaaatcatcaacaattgtaggatcctgaaaagaaaaacctgttttagtattatctaaattatataaactcgccatagacgtgcttttataacttggagctcctgttgccgctgaaccagttctaacccctttattgttacaaaaaaaagcaaagtaataaggtgtcataccattaggtttaacagtatacctaaaaccatcatttgtaataatattacaagtagacatgaagctatttgaagcagaacctaaagaccctgttaacacattagtatacacacgtcccttttgtccagttcctccttcattggctactgtaatatcccaagcaacaacataaggactattattagcttgtgtccagtttccgtcagctgtaaaagtatgagcagcataactagtaacagaaggatctaaagaatcattaggtgatataaactctactacccacactcccgtttctcctgccggtactttaaaactatatggtgtataaccacccgtagttaaatttacaggaccgttaatttcttgcgctctattggcaattaacccaactgtagtagagttcccgctactaaagctagtattaccagttggacttgtcaaaagaattgttcctccgcgaataccttgagcagaagaccctaaataaagggtttcgttggctttcgcataaacaaacattcttcctctgtttacaattgcggtactagtaggtgctataccagaactagacaacatcattctatgtcccgttgctccactggggaacaaatccttagacccttcagcaaagacattccatccactgaagagagaaagaaaacacagtataaaagtcagctgtaattgccttaattttaatgtaattttattcaacattttaatagttttgattattagtaactgctatagaatttatctccctataacaacctgaatgccattttaattcctgctgttgtagcgaatgcatgagagtaaaaaaaaagtttttaatacatgtatcgggtgaaaagcgattactttttcggagaaaagcatcaaaatcaagcgaagtaaaagagattaagaaaccctcctccagagcgcttcttctaacaaaaaaccgggttataaaaaaagtaaagttcaccatataataaataattaaaattccatacaaagtcttttcgaatatcccttgatattcaaaaattatagcgattagactcaagtcgaagggacctaaaccaccactatactctagttaatatgtcccagttttgatgcctcgcgcaccataccggcaacattactcacgtcgagtttgctaaaaatgttttttctgtgattttcgaccgtattgaccgaaagttttagttcgccggcaatatcggctgtagtaaattctctaataatgtattgcatgatcgtaagctcttttgccgttagcgtaattgctgtgcctaccctgttttgtttggataaaaaggcatagtcgtccggcagataaactccaccttcccatactaatctaatagcttctaaaagatcttcactgtcctggtttttattaacgtaaccttttacgcccatagccaataagttttcgactaatatgggacttgaaagagaggtaaaagcaattactcgcaaatcaggatgatttttatgaaggtattcatagacttccagtccctgcacatcacttgcaatcagatcaacaataattaaatctaatcctgaatgctgctgaactttaagatataaatcttgcttatttgtcgcgtaaaaaagcacttccaaatctttttgatttgaaaaaaaactagtaagacccccacagacaataggttggtcttcaaaaaatgcaatatgtatcataacacaaattagcgacaaaaaaattgttaaataaatagcggttttccctattttggcaagataattttgaaagtacaacctgctgattcattgttaaaaacggcaagcgttcctttgtttttcagcattaattcctgacacaaatagagtccgattccaaaccccgattccagattagtgcctagtcccggatttattttctgtttgaataatttgtcaatctttttttgctcgattccttttcctgaatctgttacgattatttcatgatgatcatattctataacaatagtgctgtctgcgtaactaaacttaatagcattgttgataacgtttcgcaagactatacttaaaacagccgagttaaaaatgatgactgtaccttttgctactttaagttcaattgtaatattcttggcctttacctgatgccctaactctttacaggccgcactgataaggttgtgcagcatgatctcgctataacccgattgtgcggtaatcagttccattttggcccaatcgagtaaactggtgagcatggcatccgattgttccaattgctgcccgatcgctttcatgtaggttgatacaatctcattttcatttttaagtatctcttctttctctaataaaatttttaaggttgtgattggttccttaaaatcatgggagattactgtaaaaatcttttggtgcaataaattaaggcgtttaagatcattattctttacctcaatttgctctttttgcagttttagcgtttcattggttattcgttgctttttggtcaataccacaatcgaatacaacaatatgattaataaagtaattccgattaacgaagcaataagagccactttctgtttttgcaaacgctcttctttattatagttgattcttttcaggtaagtattctgctgttcctttaacttgattttgttcgcaatttcaaacgaatcgattctgctgtttcgaatcttcatatcttctatccctactaatcgatccagtctttcgaatgttttatgagcagcttcaaactctccctgctccaccataatttctcttaaggttcgtaaggcgttaattttattctctagatcattgcagctgtccgctactcttatactctcggtaatcgctttttttgctttttctattctgttttgcctactgtacacacgggccgttttgacataaacttccgcaagcttacatggactatacttttttgccacacgctctgtgagcaaaaattcttccatgcttctcttgtggtcgtaattgatgtaataatagtatccaataattaaatgcaatacaatataattaagcctgttgacaatacacagatttacattgtaaatgaaaagaattcgcttcagccggttggggttttaggcgagattttgattggaggagatcaggtagcacgaggttatttaaataaggaagcgttaagtcaggagaagtttatcataaatccttttagagcaggagagcgtctgtacaaaacaggcgatttgggtcgttggctacccgatggcaacatcgagttcataggccgaaaagacgatcaggtaaaaataagaggacacaggatagagcttggagagatagaacatgctttagtaaaacatgaagctgtaaaccaggcagttgttgtagccagagagaacgagtcagcagagaaagaacttgtagcgtatatcgtttctaatattgagcagaacgcaagtgatttaagagtttatttaaaacagtcgctgccggagtatatgcttccggcgtactttgttcaacttgaggccatcccattaacggccaatggtaaaatagacaaaaaagcattaccaaatcctgagggtgcgggactatcgagtggtgttgcctatgtagcgccacgaaatgagctggaagagagactggtaaaaatctgtgaggaagtcctgagaagggaaaagattggagtattggatgacttttttggtttaggcatgaattcattaatggtaatcaggttagtaactttagttcatcgggaaatgaatatagaactaagaattaatgatatatttgagaacacaaacattggtaatttgagcaataagattgaatcgattatgaaggttattcaaatgaatcgcgggagtaacgatattgaatttaaacacgaacttgaaatataatggataaattaatcgcccaattactggataatggaatttttctgtcggttgaacaagatcgattaaaagtcaagcacaatagtgatttgatgtctgatgagttattgcagcaaatcaaagcgaataaatttgagttgatagcctatcttagtgcaaaggatgcctacgcagattatcaggacatcatgccaataaagagaaaggggccgtttaaattgtcatcagcccaaagaagaatgtggatcttgagccaattcgaagcaagttcggtagcgtataatttaccagagagtacctacctgaatcaggacattgaagttgaaaacttcaagcgggcgattgatgccacaatcgatcgtcatgagattttaagaaccgtatttagagaagaggagtcaggtgaggtcaggcaatgggtactggaaagggaagatctgggctttagcattcactccttggattttagagaagaggataataagaaagataaggtacaagcttatatcgcggccgattcccatcagacatttgatctgatcaaagggcctttattcagagcagccttacttcaggtagaagatgaggaatatgtattctacttcaatatgcaccatattatcagcgatgactggtctatggaggtattgactaaagatgtattgaaatactatgaagcatatcagacaggcagagagcccgatttaaaggaattaagaatccattacaaagattattgcgactggcagttagctcggttgaatgaggattcatttgacgtacataaaatatattggctggacaagttctctggagaattgccattactggatctaccgggtgctaaacaacgtcctcatgttaagacctataacggtcatggcttagtcacttatgtggataaagaaacaacggacaaactcaaagaatatacccgagagaaagggagcagcctattcatgagcttactggcctcctggaatgtgttgatttaccgttacacaggggagaaggatatcatcataggaactgctgtagctggtagagttcatgccaatttggaagaccagattgggttctatgtaaatacactggctttaagaaatgaggttaatcctgaggaaagctttgacagtttttacgaaagcttaaaagaacaaaccttaaagagttatagccatcaaatgtatcctttcgatcgtttggtagaaggcttaggccttcagagagatatgggtagaaatccagtcttcgacatatcaatcacttatcataatactacagaaattaaagggatagagggactgaataatgacgtcataaatcaagtgtcggataatggtttttctaaagtgaagaatgatatagaattgcatttcaaagaggttggagattatattcatttcaaattaatatataatgtagatatctatgagcgggagatgatagaacgcttaatgatacatttcaaacgtattctaaattcgctattatctcatccggaacaaaaaatctcgcatattgattacctttctgagaaagagaaatgcgaactgttggtaacttttaatgacacagcagtagcttatccaaaagataagacgatagtagacttgtttgaagaacaggtggaaaggacacccgacaacatagctgtagtttttggtgaaaaacaacagacttaccgtgagctcaatgagaagtcaaatcagctggctcattatttaagggataattacgacattcagccagataatctaataggaatacaattagacagaagtgagtggatgattatttcgatactgggggtattaaaagctggaggcgcttatgttccgatcgatccggagtacccatcttccagaaaggaatatattgtaaaagacaccggtttaaaattactgataacagaggctagtttcatttatgatattgattattatgaaggagaagtttttgccattgacgttgagtttgattcagagaactatggttcagaagcattatcaaaattttatactccaggtaatctggcctatgtaatttatacgtctggttcaacagggaaacctaaaggtgtgatggtggagcatagaagtgcagtcaatctgtactggtggtatataacaagtcatgagattgatactaacacaagatctctaatcgtcatccctttaggatttgatgctgccagtaaaaatatcttagcccctttattcagaggtgggatgttggttatggcgcctacgggagtttttattccggaagttattcttagtgagattttgctgaaaaaagtaacgcttttaaattgcgtacctagcgtgtttaattctttacttaactccaataatgatagtgtcaatatgcttcggtctctaaagaatctggcattaggtggagagcctcttgacataaagccaattacaagattatttacagaaggtagcaaatgtattgttaccaatgtttatggacctacggaagctactgacatttcaataagttatatagtaagtaaagcagatacacgcaatagtaatataccaataggcaagccaatcaataatgtcagtgtgtatgttcttgacgtgaatatgcagcctgttgcaataggggtgacaggagagttgtacataggaggagttgcattagcaagaggatatttaaacaacacaaatttaacacaggaacgatttattgtaaatccatttgctactgaaacagataagtcaaaaggttttacgcggttatataaaacaggcgatttgggtcgttggctacccgatggaaacatcgagttcatagggagaaaagacgatcaggtaaaaataagaggacacaggatagagcttggagagatagaatatgctttatcgaatcacgaagagataaagcaaggagtagttttagcaagagagaacgagtcgggagaaaaagaactcgtggcgtatatcgtttctaatgtcgagcagaacgcaagtgatttacgagcttatttaaaacaaacgttaccagagtatatgcttccggcgcattttgttcaactcgaggccatcccattaacggccaatagtaagatagataaaaaagcattaccggaccctggaattgcgggattatcaagtggtgttgaatatgcagcaccgggaacagaacaggaagaggttttagtttcggtatggtcagaggtattaaaaaaagaaggtatcagtatcaaggatagtttttacaatctgggtggcgattccatcaagtcaattcaggtggtagccagattaaaacagcttggctacagacttaaagtagagcatcttcttcgaacgcctatactggaagagctggcgcggttaatagaactgaccacccaggttagcgatcaaagtgaagtgagtggtgctgttgtgctgaccccaatccaggaatggtttttcaaatcagaggagataaaagtacatgagtacttcaatcaatctgttttactgtatagtaaggaagagctggatagcagtatactggagaagagcatagaagatttgacgaggcatcacgatgcccttcgtatggtttataaacaggtaaatatctcaacaatattatagaacaggatcatcgatttataaaatggaggatacaaaatgggttaggctttaaaagttttgagtcggcaagacgaacattgagcggaattgaagttgtgcatatgctgaggaagaatcagatagttaaacccgggataactatgtttaaatcattctgtaaattggcagcataacttttaaattacttaaaaacttgcatttgattctctcagatgcgacagaaccaaaaaaggccttgtaacatctacaacagatttgagaaatagaattagggaaaaatagttttgtgttagaattatttacttctctttattgtttaagtaaaataaatagaaaaagctgtcgaaaatttgacagctttttttttgaacaatacttaacgcgtttaaaatgttcaatgtttttaatctatatttggataaaagtctgaggctttaagtgtaaaaatagaccctataaataaaaatgaacataaatacaatccaacatcacagctatgaaaaaggacttcctcaagaaggaaattttatacttggacaaaaacatggagacaatatatttgtatatcaggcattcaatgataaaattgcggactatgctatagaaaatcaaaaatttggaggacaagagtacagctttgacagaatgacttggataaaaccaaactttttgtggatgatgtacaggagtgattgggcgaacaaagacagcaaccaaagtcgaattttagctattgaaatgacttttgaaggttttcaagagcttcttgccgaaggcattttaacaagctataatgaagcctacggcgatgaatctgcatggaaagaaaaactaaatactagcaacgtaagaattcagtgggatcctgaccataatattaaaggagacaagttaaaacgcagggctgttcaaataggaattaaaaatgaagctttaaaaaagtttaatagcaaatttataaaatcaattcaagacattactgattttgtaaaagaacaaaaagaaaaaattgacagcggaaaaggttggtattatgtgattaacgaatctataattgaagttaacagtgatttaaaaaagaaattttctatacctgaagtatttcgaacatcatttgttgaagaactaattttagaatttgagaatacaaaagaaatcagtcaaacaaattttgaaaaactgctagttgataacgatcaaccagaaagagatgaatttgttggttatgtaaaaaattacattaatgcagaattgtcaaggtatcttttgaaagctgctattctttacagaagagatgaggaattgggtgtgtttgactgtatgtgcgaagaccttctgatgtttagttactttgtcagtaagaataagaatataattgatcttcacttgattttggaagctaaattagtagattttgacacttggtgcggatttgatggtgaaatgattttttatcctttgggacatcaacaaacaaaagaatacatcgcaagctataaagattttttagtagaaaatattccaggatttgctcctcaaacagctgactatttcattgaatcttttgacgaagaatatttgtataaaaaaaaccatagcagagccttttggtatttttgatttgtcacaaatataaatgagttagctatcaccctaaacacctgtagaaaagaagatccctaaatgaaaatatttgataatttacagacaaaaaaaaatacctaaaggaacgattcttttatacaaggggaatacttgcaaaactgttgaagggtgtttaaaaagttatgtacttgataaatctgggaaagaacatatcttgcattttgcacccgaagattggttaattacggacatggatagttttgtcaacaataaaccatctaatatttttattgatgcgattgaagatagcgaagtatcaatacttacaacttcaaattataaaaatattaatcagttgagttatgatgatttgctcgaacaaaataaaaaattagtgaataatttaatcacaaccaatatgcgtttagccaatctattaagtgcaacagccgaagaacgatatttatattttatagaaacctatccaaccttagtacaaagactgccacttaaactaatcgcttcttacttaggtatgacgcccgaatatttaagtgatgttagacgaaaattagctcgaaagtgatttcttaagataccttaatttttatctttttaattgttcacacctttgcatcattattaacaattaaaaagtaaaaaaatgacagcaacagttaaatcaaaagggctaaacatagctttatgggtagcacaaatagaactgaagtttatggttttgcccatcatccttatgaactcatcaaattgctttgcgaaaacagcaatggttctgttgaagaatttcagcaatccgcttatatatataagaatgaagaagctgtcaatcatatgtttagggtagggacaggtttagacagtcagattctgggtgattttgaaattatcagccagataaaaatcgctttttatcatagtaaacaagaaggtttggtaaacacttttctggaccgtttggtaaatgctgttatccaagcgagcaaaaaagttaaaacagaaactaaaatttcttctggcgcaacatccgtttcttttgcatcagtgcagtatattatccgaaatgtagctgatacaacgcaggaattatcaaaagaactcctattgtcgatatggaagtggcagattttaccgaagtaataactgttgatttaattagtcctttcatcgtttccaaaaatgttgtcaaaggaatgatggatatgctaacgaaaattggagacatagttaagtgtgtatttttgcacacttaactattttacgtactcttttatacatcccctcagcaataaaccaaattctggcctcggttgaactcgaagcatattgtgaaaacaatctaaatgggaaataaaaaataaaccattgagatttcaatcaagctcttgcttaaatatggcgtgaacttgaatctgttaaataaatgataattattgaagttcgtataatatattcgaacctaagcttgtcaggccttggttttgttgtgtttgtgtttttcaatatacccatgtgccacgattctgccacaaaacttaaagtggtgaaatatctttaaaaaacacctaaactttttgtggcaaaaaaaatatctactcgtgagataaagaactcaagtttctcataaaaacagcttttgctatcttttactgagaattttagaaaactcttaaacggtgaaataaattatactcttctgatttctatttctctttggaagataatttatataaccataatcatttaagtctctgatacatctatgataggtaacagggccgcttattttagcaatcttcataatttcatgtctatatgctttaataggattaatatagcccgcagcagttctgaattgtagtaatgccgcaaaaattccaatatgggtaatgctgatacgctggtctttttctattgctttgaagaattgcgttaaaggatttagcttatccattactcttgttatttggatttttattcacgctgtcataaaaatgaattttaagtattgttgtttagtttgcgttttttttctgaaacggtgccaatagggcttattttggccgactttgtgcaggtagtaagcttgttggcgaatataacaataatatagtgaatctcttatttgtgtggcaataggctttgaatgagttgttttgctttttctgatgctgttttattatagcttagaatcagctgatttagttttagacctggattgatcccgtatcggtaactgccgggggggaatctggtttaggagtggtcgtggttgattgtgtatactattattttttggagcttttcccgctgttcgctttaatcttttgtgccgaacaccagcacaaaaggattttcactgccatcggggctaagggctgctgaggagccccgttctttagactaataaaaataagtgagattataaaaaatagcgccaattgtcttcaattggcgccatttggcttgtttgtgaactcgaactggacaaatttctataaattttgtgaatgatttgaagaaattggcttactggatgtaggggctgtctttgtagggcttcaacattttggtttggatgtcccgttggggattgataaaaaaaaatatttgatttcacaaatgatttcaagcaagcgttattgaataatttatttaaattaaaaataagcagccttaattttttatggcaaaaatggtatcaactctaatatagtttaggtataatttgtaggttctttttaagataacctgcccttcggtatttttaaattctaccgtcgaaccggcactttcgcttggggttacagttgtattttcatcgtaggtaatcgttttatagagtcttccttccgcataggttcctgcatcagtaaaactaatgtcgtacaatcctgaacctgcgtcccaagtagtattgactttgtacagttttaccgcatccgcatcggtattggtctggtaatcgattttgatttcatggcctttgcccatttcccaggaagctcccggagcagcttgttttaaaacgcggttcaatggtgatggttcaaatgctttttgagagaaaagatttaaggtattatcgtattccgatttaccataaaagatggttgctgcacttatggctgttttcgggtcgatcatggggtaactgttgcttccgttggccactgcatacggcaggtattctttggcttgccggccaaagtcatcatactccataggggttacaatgtctttgtctcctgttccctgaccgatgataatggtttgtatcggacggcctaatccgtcaaaatacgtcacagtctgactcatttcgtccttggtcagcgtacttagatttgctgctttaaccggttttttaggacttagggtgtatataaagttgccattgcttaaagtttgagctttgatactctcacttataaagaataataaaattactcctgctatatatattttcataagagtcattattttatcaattaataacagaatttaccaacatttccctttacggaaatcttttccaaacgcattgatatctttttgagcttttgcatctgcatcttcttgtgaaattgtagaggaatattgcccggcaggaacagtatatgtagtattacttttttcgggacacttactcagtacaaacattctgcttttagctttattataaaaagtacaaatacttgtcgcattagcttttgcttgtccatttacattaaataaagctaatgcctgccaatctgcatcagcctgagaaatagttgatgtttttgaacctgccggaagtgtataacttacgacctgcccaacaccttcaacaggacaattatttttagtaaatgtaccggtcttgcttacactagaaaaggtacaagttccaatagcattagcataaatctgtccgtttgcattaaataatactgttgcctgtgcatttgcatcagcctgagaaactgtcgatgttttctcccctacccacagcgtgtaattaacgacctgtggcacacctcctccaaagcaactatttttagtaaatgtacccgttaaacttgcacttgaaaagatacaggaaccaatagcgttagcatttacctgcccgtttgtattaaataaggttgctgcttgggaatctgcatcggcttgggaaacagtcgatgtttttgaacctgccggaagcgtataactaactacctgtccaacacctcctgcaacgcaattgtttttggtaaaatttcctgttatgctaacgttagaaaaagtacaagttccatttgtatttgcaaagttttgtccttcagtattaaatttagttaatcccttactgtcggcttccgcctgtgaagaattagaaaaggctgcgccatacggctgactatagacaatacttgaacctgctcctcctgtcgcgcagttattcttagtaatagatcggtttattgcggcactgtaaaaagtgcaggtcccatttgcattggcataggcttgcccatcagtattaaatttatttaaaccattgctgtccgcatcagcctgcgaaatcgtagacgtatacgccccaaccgcctgactgtaactcaccatttggcctgttcctcctgcagcacaattatttctggtaaacgatccgtttctggctgcacttttatagaaatactcgctggccgaagtattatcgctgcaatccgtttgctgacctttataattgtagcaatatttttgaactacatttagatcctgatcctttacaaatttcaatcttcccaaagtatcatattcataataagaaggtatacctttgggatctgttatacttgtaacaccaagcagtggattgtaagtgtaagtagtaataaaactatttggaaaagaatttcttaaagcattcaaagcctctctcaataactgttccctacaatcatctgacatgcaattatcagtatctgcatttgaaagctcctgtaaatttattatagttcctgccgggatcgaactataagatacattttcaattttggcaataggttgtgttttattatatccccagattatagacaccggtactcctgattcaggtgtatattgcaaaatgtttcccttatcatcatactgatcgtaagtaattttcttttcaagattacctatattaggaatattaaagagttcatttgtaaacttagctgcatatatcgcttttagaagcaataaattactagttgacgtacttttatcataaactgttttatccttagaaaaaagtgttcctctcctatatttctcaatagctatcgatataccgattctgttcgttgtttttaactcggccataaaaggctcgtttaataaatcatcaggatagtaatatttcttttctaactctttctcttcatttaagtttaaaatactttctgatgttaactgtagatgggtattattagcataatcgtataaggttgttactgacacaggattttgccccttaatgtcaaatgaggatactattttctttgataaataactaaatctgctagtaatcgaatattggtttattacgtacagtacgaaatttttagcgctataataaggtattcctacaaaattatttttactgtattctaactcgggtttagcatcataaaaatattgttcaactgatatattttttaccaagctattttcttttttaaagattcttttctttctaagtttcccatttaaatgagaattagaatagttaacatttctaataatttcctgacataacattaacggttcaatgtcactatgaacatcaaaaatattctcaacgcctccattttcgaaatgatccccaccccagctctctactacagaactatatcctattgttgttccgtcaaatgaagtaagggaattttttggactggaagttacagtgaaggttctaacaaaatctctagtggatatatctcctgtatattgtcccaaatcaattaaatcaacatccgaaacatctatattctccgttatataaggatcaattgtcgcaaatgaccccgaagatgtttccaaattattcaaagtgccataataatatctttttacattcgcagatccattattatcataatcagtagtacgcataactcgtactccggccatcgaagtttctttattttcccaatggggttccatcccagttggaaagaacttaatagacgcattaccaaaagagcactttgaagctttcaccgtaattttataccaacctgcttcaaggcatacttctttatttataaccctttcctgagtattatcgaacgaatacaaaatagcatctgtagacgcatcgagaattttaacaacaactttctgccctgttacatggtgtggcgctgcaaaataattttcacagagtccttcttcatcacctattccaacattaccagaaatagcaacaacctgccttttaccaatttggaagggaatcgaaacacctgttgtactatccatacaatcaaccgtaacagttgaaacatttttccctttcacaaaaacatttgcaacaagtttatttgattcatactccaaaactgtctttcctttagttgggtaataaatagatttcaacatcccacagtaggtatataaatcattaggagctctcaatgaaccaatacttttataagcagtaaataatggagaagaataacactcatttccgggaacggtactggtagagatattgttaaaaataagatcatttaccccattacctccattaaaataaccatataaatcttttgcaaatgaatgccttgccggaagtttttcgggctgataataatcaaaggagtatttaacaaattcagctgatgaactttttccttgttctcgcacttctttcagaaatattaatttctgatctacattggtatacccaatattggtctaacctatttaaactgttcttctaatgcgttaacaactttaaatatgaagaatggaaaaaatacgattatgagcaattacaattttgatcttaaaaataatccaaagcttagttgtattcaggttgataacgcttcatattctactattaattggagcagcgcaaaagatgctacagcaaattactcaaacgaatgccagaatgatttatacacgcttattcctgacagcaatttcgaaaacaaattgattaaattgggaattgattcaggaactcctgacggaagagtattaacctctagtgttaacaccgtaacgtctttagatgtctccctaagcaatattacagacttgacaggcctagaagactttacctctttgacatcattaaaatgtcaagcaaattatactttaaaagctctggatgttacaaaaaatatccatttaactacattggactgtagcaataattatcttataacaacattagatgtatcaaaaaatacggctttagttgatttaaattgttattacaataaactgagcactttagatgtaagctcaaatacaagcttaacctctctacaatgtgggtccaataagttaacaagcttagaggttacaaataataaagccttaactaaactaactcttggatacaaccagatttcaagtttagatgtatcgcaaaatatcctgttagagtctttagattgcacctcaaatcaaatttcagacttaaacatccgttcgaatacaaaattaactgaactgtgggctggaaacaacctgtactcttcgttagatgtttcaaataatactgctttgaaatcgctaatatgtaatacaaatcaattaacatcaatagacgtttccaaaaatactgcattgacaagattgttagtctaccaaaataagatagcaagtatagacatttcaaacaatactctattaagctcttttgattgtggtacgaatttaatcaccaatcttaatgtctcaaaaaatatagatttgcaatttttatactgtgacaagaataaattaaccaccttagatgtctctgcaaatactaagcttggcacattcgattgtgctaacaacctgctcactaacctggatgtttctaataacaaaaatttaagatcgcttgaatgtgaatccaacaaactggtaagtctaaacctaaaaaatggtaataattataggtttgatccacttctaggctctgatcctaattttattttatatagaatagattttagaaacaatccggatttaacttgtattcaggttgatgatgcttattattcaaacgagaaatggtccacaagaaaagatccaaaggcaaaatttagcgaagattgcaacaatagtactttgataacagattctaattttgaagattttcttattgctgcaggtattgacactgacggaaaaaatggaaaagttgccacctccagtattgctaatattaaagttctggacatttcaaattcaaacatctcggatttaaaaggaattgaaaacttcaccgctttagagaaatttatctgtaaaggaaatttaattactacagttgacatgtcgaataacactcagttaaactatctggacgtctcaaacaatccgctgactagtattaatgtttctaaaaataaattattaaaagaattttattgtaatggaatacaaattattcttaaaaaatcgacttcgacccctagcaggttaacaactttagatctatcgaacaatactttgttaacaaaatttaactgttcgaacaatcagctgtcaagtcttgatttatcaaaaaacactaatttaatagaagtaaactgttctaataaccttctaaccgatttgaatttacaaaatggaaacaacggtgttttagtcaacttaaatttaaaaaacaatgctcagttaacttgtataaaagttgacaatccttctttctcaactgctacctggacagatgcaaaagatgaaatcgcaaaatattcgacaacttgccgtactttagaaacaaatgagcaggtttttaaccacatcaatatttatccaaatccatctcagggcgagttatacattacaaacgtgtcagtaacaaaagcaacgatctatgatagtttgggtaaacttgtaaaagtaatatccttaaaagcagatactcaggaaaattacatcgatttaaaaggaatagccaaaggagtttactacatctttatcgaaaactctgaagcacacaccgttaaaaaaatcatccttaaataagtattctcctatttcactaaaaaacacattttaaaaaataaaatgtgtttttttttatcgcaaattaatgatccatctttcgctactttgttattaaaaaaaaataaaataccaattaaactttattcttttctataacttttctcaatatctgtgtgaaaagatcaaaatcggcaagggtgaaaagaaattttaaagtattttttaaaataaatccttaaattcgcaagcacaaataacaaaagaataaatcgataaatgagtttcggaattaaacttcattttcgataataaatactaaaaaccaaaaaaatgaaatacgacgttattgttttaggaagtggtcccggtggatatgtaacagctattagagcttcacaattaggctttaaagtagcggtaattgaaaaagaaaacttaggtggtgtatgtttaaactggggatgtatcccaacaaaagcattattaaaatcagctcaggtttttgattatctaaaacatgcttctgactacggattgaaagtttctgagttcgacaaagatttccctgcagtggttcaacgcagccgtggtgttgctgaaggaatgagcaaaggagttcaattcttaatgaaaaaaaacaaaattgacgttattgaaggttttggaaaactaaaaccaggtaaaaaacttgacgttacagacaaagacaataaagttaccgaatatagcgctgatcatattatcatcgcaaccggtgctcgctctcgtgagttaccaaacttaccacaagacggcgtaaaagtaattggttaccgtcaggcaatgaccttaccaactcagccaaaatctatgattattgtaggttcaggagcaattggagttgaattcgctcatttctacaactcaatgggaacagaagttactattgtagaatttatgccaaatgtagttcctgtagaagacgaagacatctcaaaacaatttgagcgttctttgaaaaaagccggaattaaagtaatgaccaactcatctgttgagcgtattgacacaacaggtgcaggagtaaaagcttttgttaaaacagcaaaaggagaagaagttcttgaagctgacattgtactttctgcagttggaatcaaaactaacattgaaaacatcggtttggaagaagttggaatcgctgttgacagagataaaatcctagtaaacgcttacaacgccactaatattcctggatactacgctattggagacgttactccaggacaagctttggctcacgtagcttctgctgaaggaattaactgtgtagaaaaaattgcaggtttacacgtagacccaatcgattacggaaacgttccgggttgtacttatgcaactccagaaatcgcttctgtaggtttaactgaaaaacaagcaaaagaaaaaggttacgaattaaaaattggtaaattccctttctcagcttctggaaaagctaaagctgccggaactccggacggattcgtaaaagtaatctttgatgcgaaatacggagaatggttaggatgccacatgattggtgcaggtgttaccgatatgattgcagaagcagttgtagcccgtaaacttgaaactacaggtcatgaaattcttaaatcgatccaccctcacccaaccatgagtgaggctgttatggaagctgttgctgatgcttatggcgaagtaattcacttgtaaaaatatacaatgtaaagatgtaatgtctatacagagttatatataattttcaatttataaaatccgatttgcttaaagtgatgactcgcttgggtttgcagttgtattctcgtcgtacgtaatcgttttgtaaagcctcccttcggcataagttcctgcatctgaaaaaataatgtcgtacaaccctaaatctgcgtcccaagtggtattggctttatacagttttacggtatcagcagcggtattagcctgataatcgattttaatttcatggcctttgcccatttcccacgaagctcccggagcagcttgtttaacaacgcgattcaacggtgatggttcaaatgccttctgagagaaagggttcgcagtattgtcgtattttgcagcgctataaatgccttttgcggcagctatggccgtattagagtcaattctgggataactgctgcttccattggcagccggagacttcctagcagttacaggctaacttgatttctattttaacagtttggtacattttaaagtgctataaaagcaaaagccactccgttatggaatggctttaattttgttactatttataataaatttttagttaaacatctaataaagataagtcttcccagatatcaacataattgccactttcggcaattagtactctactgccaggtgctaatcccaaataaggaagaattaatggacaataatcttctaaatgtatagcatgtaaaggtttgaaaaaatcatccttctcagaataatctcccgaccaaatataccatccagttgtatctcctacaagaggatggcgcagagcatggattggcatagttaaacttttttcttttgtatctaatgctattccaaccttaagatttaaatcacaaggctcaaaatttataccatattctttacaaattcctttttgaatttcgattaatttatttttttctgtcatttataatagctttcatttttttagaatatgcactcatttcccctgcttgtttacctgaacaagtttggcaatgggaattaaccgattctgttgacttcattttttttaaatcaatagaacctgtttcataccattcttgtactagaggcttaatatggtttgcaatcattggctctgacgtgcctccacaatcaacgcaaggttttccttgaacagacttacgttgggcagctgtagttgcattattaggccttgaatatagttcatttgttacaggtgcttctgacaaaccacctttcatagttgaacgtaccttgctaaatcctgctccaataacttcccccgcaattaaagagcccgctacttctccgacaacttcaccacgagctactccatctccatttattaaagaatctgtacctttgtatacaccattcaaaatagtatctccagcacctgatgagtttgtacccaacgcactatctagtgcttctgaaccttgagaacctaccgcaagccataaagcagtatttcctaaaccttttgctgtactaacaggatttttaacagcattccatagtccaaccccaatattagttaatccctgactaaatcccattgtatgcgctccaactccattaggatttacaacagcatcaacagctagccaattatgcaactgcaattctttcccttcgagctcagttcccattcctagcttattctcttggaatgcataagttgagttatagggataattttcagccaaagggtcgattgacatgaatctaccaattgcgtaatcgtaatttcgatacttaaagctgtcccattccaatcccagctcatcttggcgttcttgaccttggtacttatacttattactcgtaggtacataatcattatacccattgtgtttcaacccaaaaggataataattattttcgtcaataatagtaagaacttgcgttgcgggatttttagcgtaactcaatcgtatgttacccaaatgatctttgtattggtacacatattttttacctatgtaatcataatacccctctgccgtagggaaaaactccaacgttggtcgcgatggagcagcctgacttgccgactgcgctgcaaaggcactaaaacgattcgcttctgccggtggatcttttgggtcagggtctacatcatgaccaacaggaggatcagtatttcccggatcatccggtgcaggaggatcaggctctccaccccctggctcaacaggatcaaccggaatactttgaccttcgctatacctgtactgaaatcctcccagataattggtcgtagttataacaccatctttatcctttacaaatttctcgagtttttgacctgtcgtgttgtaaatatactcaattgatcgagggcttgcaaaggtaatttttgtgtaccgctatttcaggactagacaatgtaaataaaaaagccactccgctatggaatggctttgtttattagaaaaaatttattatcaaaaaaccttataagttccgctaccatcaaagtcattttccgaatcaatatctgctaataccaatccaaaatctgtcgattcaaaatttgaaactaattcttcccaatatttttcatttattaattcattgtctgaattaactaaatcatcataattgaattctttcaaaaaatcaactaataaatcttcattaaggaataatatcaaacctgtatcagttgaaaaaaatgacaaatcttctaaaacaacttcatcgtaatctactttctttatttggttaataaaaaaaatgttattatttgctttatacaaagcaaatggtgtatcggtaaacggaaaaactttatttctaatatctttgggtaaaatattagctttcagaaattcatttttaatattagtaacgtaaagtgcatcaataatgtaatatttcttgcctatactcaattctaaaggttcattatttttagatatatttttcattttttaatatttttatttataaggaacataacgagaatgttctaatccatgttttgcgagcattgattcagcctgataaaatatttgagaaggtgaagcacttggattcgctttgataaaatcagcccactgctgattccattttccctgtccatgcaaagattttagatgattttttgcactgatttgaatagtgtaatcatcaatatttttaattcctctactagcaaaccattttctaaactgttgagaaagcacatgatgtttatgcaactttccagcttttagcaaaccagttaatgctcttatagaggtagacggttttgcttttccctttgtaaccacagcaaaagctaaagcagttgttggcgaatcaccacctatttctgagaataactctgtatagaatgcatcccaaaatccaaaaatgtcgaacgcaccacctacaggcgtcgcagaaccatttactttacggaagctaccaaaatctggagttgttaattctagattttcatcaaattgataagtcagtccaggagtataaaccatccctggcttttcttttcctactactggtaatccctttttcgagcctcctttttcccaatcgtcatcaactaaataaacattatcatcgccgtcatttctatgctcaaccacttttccagctccattgatgaatgttgcagatagaaaagttgatgcttcaggtgagagtccagttgggtcagaaaaatatatcggattattatttgaaaaactatatggtgaaaattcaaaaaaactttccgctagtgcatcaatattaccccagcgcccaatatcaggcatgtaatttctagcctccatgtcgtaaacctcaagccccagctcgtcttgcaactcttttccattgtacttatacttattacttgtaggtacataatcattataccccttgtgtttcaatccaaaaggataataattattctcatcaataatggtaagaacttgggttgcgggatttttagcataactcaatcgtatgttacccaaatgatctttgtattggtacacatattttttacctatgtaatcgtaatacccctctgccgtagggaaaaactcaagggcatcgtgatgcctcgtcaaatcttctatgctcttctccagtatactgctatccagctcttccttactatacaataaaacagattgattgaagtactcatgtacttttatctcctctgatttgaaaaaccattcctggattggggtcagcacaacagcaccactcacttcactttgatcgctaacctgggtggtcagttccattaaccctgccagctctcccagtaccggtgtgcttaacagatgctctactttaagtctgtaaccctgttgttttaatcgagctaccacctgaattgacttgatggaatcgccaccaagattgtaaaaactatccttgataccgatgccttcttttttcaataccgctgaccataccgaaactaaaaccttttcctgttctgttaccggtgctacatattcaacaccgctcgatagtcccataacttcaaggttcagtagtgcttttttgtctattttaccattggccgttaatgggatggcttcgagttgaacaaagtacgccggaagcatatattccggcaacgactgttttaaataagctcgtaaatcgcttgtgttttgctcgacattagaaacgatatacgccacgagttctttctctcccgactcgttctctctggctacaactactccttgatttacagcttcatgttttactaaagcatgttctatctctccaagttctattcggtaacccctaatctttacctgatcgtcttttctccctatgaactcaatattgccatcgggtagccaacgacccaaatcacctgttttgtacaaacgctctcctgctttaaaaggatttgctacaaacttctccttggttaacgcttcctggtttagataacctcgtgctaaactattacctcctatacaaatttctcctattacaccaattggcagtaaattttgatttttgtccagaattaaaacctggcgaccagcatacgatctaccaattggaattgtattctcaaattttgcgagcttgccctgtaacataattggaaaccatgtagctgtaagcgtcgtttccgttggtccataaacattgtaaaactcttttgtaaaatttgaaatgttatgccaatgtttttcaaatattcctttttcaagtttttccccacctattgcacaaaactcaagcttatgcgaaaatgtctcagaattaaaagttgttataaaagaattaaagaaggcagttgaaaaatctgcatgtgtaattttatattttgaaattagtccataaatatattcaggatcaacgttatgtgtttttatatacaagctggcaccgaagcataaagttgtaaaaatttcctgagcagctgcgtcaaaagcaacgttaaaaaattgcaaaaagcgagattcggcacttactccatataaatttttaacattaaaaatatgggcaatgatgctgcgatgttcaattaaaacgccttttggcagacctgtagatccagaagtatatatggcataaattaagttatcaggacttaattcttttaataaatttgtcttttgatacgataaactttcggcaataaaaacatccaatttacttttatcaataattaatgagcatttactatcgtttgcgatatattttattttttcttccgggaaatctaaatcgattggtatatatcctgcccctgcttttaaaattgcaagaattgtaataatcatattttcatttctctctaattgaaaaccgattaaatcatctggcctgattttataattattctttaaataatgtgcgagttgattcgaacgcttatttaactcgttataggaaatttctttaccttcgaatacaagtgctactttgtttggtgtcttttcaacctgttcttcaaacaagtccacaatcgtcttgtccttcggatatattgctgttgtatcattaaaggtgaacaacagtttgtgtttctcttcttcagataaataatctaatgctgttaaagactgatccgcgttttgtgcaaacgccttgattacggtatcaatatgatttaccagctgctttaatgatcttgtatcataacgattgctatcgtatctaatgtctatctttagtgaaaaagcggatgggatcactataatattaaaatcataattggattgcgcaataacttccactgaatctaaggtaaatccttcttcttcttcccggctattgaatacgccttcgttttccagttcctttactgcatagttctcaaatatcataatatgattgatcagatccatgcccggttcactctgtgactgaacctccgacaggttcatataatgatgtgatgtaccttgtatcgattgctcttgcagcatttttaacaggtcagcagccgtagtatcaacatcatactttactctgaccggaatagtattgataaacagtccgatcatatcttcaactcctgctaaatcggccggacgacctgataccacagccccaaacaccacatcactcgtgttgttgtaacgtgacaatagatagccccatacaccttgcataaaagtgttgtgggtaatgcctaaagtggtacaaagtgtgtctacttgcttaaacacagctccccctatttcaaagtgttcactgtattcgacataagtagtatctacagctcttgtcttaaaaggaatctctgccggtactgcataacctttaagacactccttccagtaacccagtgaatgttctctgtttatggttttcaaccaattgatataattggaataaggtattaccggtgacagatcagctgtactgccttttattgcggcactcaacagttcattaaagtcattgataagcacacttacacaccaaccgtccatcaggatatgatgatggctccagataaactcatactccccttgcgacagatcaacaacatgcaaacgcatctgagaaccactgcctaaatcaaaacctctttccctgtcctgttgtttgatcagcgctacttgcaaatcttggtctgccgaaccgtcaagtttctgataagtaaaattactcgctacttctttcctaacaatttgcaaagatctccctgcatattcagtactaaaactagtacgcaaaacagcatgtctggctgttaaaccctggtaagcaatagccagtttatcgatatccaatactttggctcgtaccctataggaggtctgctcaaaataaagcgaaccggaatcttctgccagccagtggtagtagatgccttcctgaagaggagataactcatagacatcctcaagggtattatctgcgttaagctctaagagctctgccccgctcaatccttggaaagttaaatccgatggggtcagatgctgctctttgcttttagccaattcctctattaaaaactccaaatgtttcttgtaagatcctgccagttttttaatcgttgccgcatcatacctcaaacctgaataacggatcgatatacccagttccccctttaccagcatccccgatacatcaaggattgtattcattttattctctttagaggtatctgatcccatatgctctgaggcatattcaaacaaggaatcttcctcattggatacatttacaccaaaatcacccaaataattaaaggtaatctccggtacaagtgtactctcaagtctttcctgacttaagtgggtcagaataccataaccaattcctttattaggcaaacggcgtaaagcttcttttactgccactaaacttgctctctgagtggaagaacccgatacatccagtacaaacgggtaaaccgttgtaaaccagccaaccgttctactgatatctactccatcgatgatctcctctcttccatgaccctccatctgtaagacacttctagccaattgtgaggggtataactttatttgtatagatgaaattaagtattttcctaatctggaagtgctaactatagattcttttgatttacaagagctgaacttgacttttaaccctaagttaaaaaagattgatattaaaaacagtgagcatcttacagaaattgatttttcaaaaaatacctttcttgaaattttaaaactagagaatttatttttagaaaatttaagtttaagagcaaatacaaacctgagaaaaataacttttgatggtttaaatgatatggatgagatagatttaacgcataatgtgaatcttgaggaattatatattagccatatgctgaattttgatgccagcctgaatgaaaaaaataaaagactaaaaaaaatatattgttcatatggtggttcatgcagctggagcgaaaatggacttcctgaattagaagatcttactttagaaaatgctgagattagttcaatagatgttacaaggctttataaattgaagaaattagatttaacttggaatcagatatctgaaattaatctttttaacaacatactactagaagaattacgcattggagataatgcattctccaacataaatcttgaaaaaaatataaatttaaaatatcttcatctgggtggagattctaacaggtggtcatatgaaaagatcaatcatgattttttagatgtcactaataacaccaaattgattgaattatttattaattcaatgggcttgtcgaatctggatctatctcaaaatttatttcttaaaaaactttatattaatgaaaatccactaaaatctattgatttgtcaaaaaatgatttgcttaataatttgagtttgctaaatacaatgttggaagatatcaatctttcagaaaatcataaattagaagaggttcaactacaaaacaacaaattaagttctattcagtttcctcttgaaatgaaaataaaaaaaatgagtttgtcaaaggatatgttggataatgtcactatagaaaaacttttagctgagggttttgtttttgaaaaagattgatatccttggatctccaaagtgttcaattgaaaagcagcacaaatctttttgcttcagcacttaaataataactttacattaatacacaaagcttggctatgtgaaagaaaggtattcctttttgtactcttttttacgcatagaatctatgtttctatttgtttaaataaaatattttgaaattatcacactgtgcaaaagcctcctactttgtgcatttttgtgtacttatgtgttattaaattttataaatgtctcctgactttaaatgttccttcttactttattttagtaaatgaattcttaatactgatgtaaggtaattttaaatatgccataactttggccttaagattaaatcgtttttttgacataaaaatttttttatggaaaagaacaaggatttaggcagaagaaggtttcttagaaattctttattggttgccggaggagttttcatcgccccattgattgaaagctgcagtaatgatgataaaccagaccatgatgatgctccagatggaatgaaaaacgaaggttttgaaaccggagttgccagttttgacccaactgaaaccggagtgattatctggacaagatattcagcaggctctgatgccgaaattaattgggaaataagtaagaatgctgcgtttaccgaaataaccagaaaaggacaggcggcagcatcatctacaaatgattttacaatagcggtagatgttcagaatattccatcgaatacaaaatatttttacagattttttaatgccaaaaccaaacaagtaaccgttattggagaaactcgcacattaccttcaaaaacagacagtgtaaatgatgtaaaaatggctgttgtttcctgttctaattttccggcgggacttttcaatgtatacggagcgattgcttcttcagaggccgatgtagtggtgcatctgggagattatatttacgaatacgcgccgggacagtacggaacaaatccgtttaccaatcctctgggcagagaacacaaacccgccagagagattacaagtcttagcgattacagagaacgctacagacaatatagaggagataaaaacctgcagcttctgcatcagaaaaagccttttatatgcgtttgggacgaccatgaatttgccaacgatacttataaatccggtgccgaaaaccatcagccttccgaaggagattttcaggtgagaaaaatggccgctttccaggcttatagcgagtatattccgcttaaaacaggaaaagactttagaatttacagaagctttaatttcggcactattctttccctttacatgatggatacccgagtgattgccagagataagcagctgagttacggtgattatatcgataacagcggaaattttaaccagactaaattcaaaaccgatctgttaagtactaatagaaggttaattggaagcgaacaaatgacatggctgggatcgcagatcaatgctgataccgctaaatggaaagtactgggacagcagatcctgatgaccaaaatgctgattcctgctgagctgttgatgcttttgaatcaaattttaggagaagtctctaaactaggaagcgcaacacccgcgactatgaaggcgcttacaacaacaatctctcagcttgtggttattaaaatgagacataaacaaggagatccttcgttaacggcacaggaaattgcgagagttaccactactttaccttataacctggatgcctgggacggctattttgccgaaagagaacaattgtatgcaatgctttccggaaaaaatgtagtggttttggccggagatactcacaatgcatggatgggtaaacttacagatatgcaggggaaacgcataggaaccgaaatagcgtgcagttcggtgtcatctccgggattagaatcgtatttcggaattacttcagaccctacaaaagcgatagaactggcacaagcgtttacagtcctgatcgatgatttagaatatgccaatttgtacaagcgtggatacacctatcttaaatttacagcatccggttctgaagccgaatggcgatttgtagacagtgtaaccactgaaaccaccaatacggttacagaaaaaaaatatactataggataggaattttattcgacagaattccttatgaaaagttgcgcaaatgtctctgactttgcgcaactttttgcgcttataaattattacagtttacaaaactcttcattcccagtagagtcccttatgaaaagctgcgtaaatgtttctgactttgcgcaatttttgtgcttataaattattacagtttacaaaactcttcattcccagtagagtccctaatgaaaagctgtgcaaatgtctctgactttgcgcaattttttgcgcttataaattattacagtttacaaaactcttcattcccagtagagtcccttatgaaaagttgcgcaaatgtctctgactttgcgcaattttattagttcttataaatcagaatcgtttcaagagtctcagactctttttcatcagttaatagatatttaaaaataagttaaatcttatatttttgtaaaagagatttaaaaatgaaagagggatacataataagagatcaaatattgccacattttataacttcaacagttgtagactgggtagatatttttacacgtcaggtatatagagatattgtcattgagagtttagaatactgcattgagaataaaggtttacttcgtgctacttcgtgaaattggtgtttcaataggaattacactaattggtactaattttttgccacagattggagcgattaaatagatttttacttcgtgctacttcgtgaaattggtgtttcaataggaattacactaattggtactaattttttgccacagattagatggattagaaagattttaattcgtgtgaattcgtgaaattagtgtttcaataggaattacactaattggtactaattttttttgccacagattagatggattagaaagattttaattcgtgtgaattcgtgaaattagtgtttgttttgaaatctcgaatcaaaattcattttggtagtgctgacaaccttaattttcttactgtccggatgagccggatttatgaggtaattgaattcctgcggtactatacagcttggaacttttaaaatagcagcttcattgtaatcaataaaatcgtcgccaatcgtttgtgttatcaggattggaggtttggaattccagtcttccggtaaatcttccagtcgaacttcctgaatggtgatttcatccgggatttcgatctccacataaaatcgatccaaaggtaaatcttcgcttaaatctaaatgaacggatacttcaagcgtagctaatgcacgactttcggctgtgtaaaccatacgggtgttgaggctgttccatcggaaaccttcagacatcgaggctccgattcctgctaaagtagaggacaggtatttttctctttcgattctaaaaaccttcattaagctaagtttccgtactctagtcggtttaaactaaatttcacctcgttaattccggttacagtgtccagcatgttctcaggagtgcttccgccaatagataaattaggctttttaagccacctttggaatttttcttcttcattattgaaaacttccaggccgtaatcgatcagttcattgattaaaataaccaattcactgtctctgctgtctaaaagtaaatgctcgctttttttcttattgtaagtggtttgaggaattcccacaattgccagcatagattttacagggttgtttagtcgcctgctaatgacttcaatggaatcataaggaataccggatcggataactccaacgcgttccattttgttgctccagctgtattctttcccgtcagaacttagagttgatcttttaatagaaattactttcccggaagcatttcgaatgcttctcttagtatcaaaaggttctgtattttgttttatctttttcatgatacaactattttgctataaagatacaacaattttgttgttcatatcaaagttcgaagaaaaaaatcccgatttgcaagggtagagttagatgatcttcttaattacacgcaatttgtgagtgtgtttgtttgtttcgggattgtagattcctaagtgatccaaacgatcaatgcgaactttaccgctggcatgaatgatgtaattattgtccatgataataccaacatgtgtaatgtttccttcgtcgttatcaaaaaaggccaggtcgccggcttcgctttcttcgataaaactcaggggttctccgtcaagagcctgttgtgaggcgtcacgatgaattttatagccgtttaatttgtaaaccatttgagtgaaacccgaacagtcaattccaaaaggagttttacctccccaaagataaggggcgttcaaatacataaatgcagtacttatgatagcgctcttaggtttgataccgctggttttggttccttcaaaatcaaaattggagatattgatttcactgttatttaaaaaagacaaagaagcgccaagcggaatgggtagtaataaattgttggcagaagtgatgtaatcaatcaagtcagcatttaagataatagcatcattgcttaattgtttaaaatttgcttccgaaataacctggtattgtttcgaatctacccagccttcatagtcgtcatactgaattcttattcgggcccattgattttgacgttccaaaatctcgatatgttcaccaaacaaaagttgagtaacgatttcacttctgtcacttggctcagctcgtacgggtactatggctaaattgcaaattccgaacatttaaggtaatttataagttaaaaattaggagttatctggaaaacaaataactcctaacagaatagtattaagctctctcgataacaattgccgaagcacctccaccgccgttgcaaattgctgcagctccggttttggcattgttttgctctaaaacacttagcaaagttacgatgattcttgctcccgagcatcctagaggatggcctaaggaaacagctccaccgtttacgtttactttatcgttgtcaagattaagaatttttgaattggctaatccaaccactgcaaatgcttcgttgaattcaaaataatcaacatcacttactgagattccggctttgtctaaagctttcggtaatgcttttgccgggctggtggtaaaccattttggctcctgagcagcatcagcgtatccttttatgtaagccaaaggttttaatcctaaggaagctgctttttcttcagacattaaaaccaaagcagctgctccgtcgtttatggtagaagcattggcagcagtaactgtcccgtctttagtgaaaacagctcccagtgtagggatcttatccagttttacattggtgtattcctcgtcttttgaaacgataataggttcaccacgtctttgtggaacctctactggtacaatttcattatcaaattttccggcatcccaggcttttgcacttctttcgtaagactgaatcgcaaaattatcctgttcttcacggctgatgttgtattcagatgcacataaatcagcgcaaactcccattgcgttgttatcgtaagcatctgtcaaaccatctttctgcattccgtcaagcatagaagccggaccaaatttagttccgttgcgcatctgtacataatgtggaatcaagctcatgttttccattcctccggctactacgatttcagcatcaccacaagcgatagcctgtgcggcgaacataacagctttcattcctgaagcacaaactttgtttacagtggtagcagcaacctcttcagataagcctgcaaaaagtgcagcctgacgtgctggtgcctgaccaactccggcctgtaccacattacccataaatacttcatcaactaattttgggtcaaggttaattttttgaagtgcgccttttattgcggcagcacctaatttaggggcaggtacagtagataagcctcccatgaaacttccgataggtgttctaacggcagaaacgataacaactcttttgttcattttctgttaatattagttaatcaagcaaatttactctttatttaaataaattcaaattttgtctcaattcgattgaattttaaatttaatgtgaatttttagttaattctatttatttgattgtgaagtgttttgaaaaaaagattaaaaaaacttaaaaaaaagcttcaaaatagttgtgagatatggaatgttgttatacctttgcaaccgcaaaacagaacacgattcttgagcttggagaggtgccagagcggtaatggagcagattgctaatctgtcgacgggtaaccgtcgccagggttcgagtccctgtctctccgcttagattttgcctcggggtgtagcgtagcccggttatcgcgcctgctttgggagcaggaggccgcaggttcgaatcctgccaccccgacagagaaaaaccataaacattgtcattttaatccaataaacattcataaaacaaaaaaacctctcaatatcttgagaggtttttccataaatctataaaacagtaataattacatattccttctatactgcccccctacttcaaacaatgccgaagtaatctgtcccagcgaacaaaccttagtcgcttccattaaatgggcgaataaattttcgtttttaatggcggcttcctgtagttggcgcaggtgctcgtttacttttgcttcgtggaactggtgtaagttatcgagcatcgtaatttgatattgtttttcttcttcggtggcacgaattacttctgccggaattaccgttggagatccttttgaactcaggaaggtgtttacacccacaatcgggaaatctccgttgtgctttaaggtttcgtaatacaaactttcttcctgaattttagaacgttggtacatcgtttccatagcacctaatactccaccacgctctgtgatgcggtcgaattcctgtaaaacggcagcttctaccaaatcggttaattcttcgatgataaacgatccctgaattgggttttcgtttttcgccagacctaattctttattgataatcaactgaatcgccatggctctacgcactgattcttcggttggtgtggtaatcgcttcatcataagcgttcgtatgcaatgagttacagttatcataaatcgcatacaaagcctgtaatgttgttctgatatcattaaaatcaatctcctgagcgtgtaacgaacgtccggaagtttgaatatgatattttagcatttgcgctctttcgttggctccgtatttgtttttcatggcttttgcccaaattttacgtgccacacgtccaattactgaatattccggatctactccgtttgagaagaaaaacgataagtttggtccaaaatcgttaatgctcatgccacggcttaagtaatattctacgtaagtgaaaccattcgaaagcgtaaaggccaactgtgtaattgggttcgctcctgcctcggcaatatggtatcctgaaatcgaaacagagtaaaaattacgaacgttttgagtaataaaatattcctgaacgtcacccattaatcgcaacgcaaattcggtagagaaaatacaggtgttttgtgcctgatcttcttttaaaatatcggcttgaaccgtaccacgaacttgtgataaggtttttactttgatatcgttatacacttccaaaggtaaaacctgatctccggtaactcccaaaagcattaatcccaaaccgttgtttccttccagcagatcgccctggtatttcggacgttctgttcctttttctttgtatattttgttgattttggcttcaacttctttttctaaatcattggctttgatgtaatattcgcattgctggtcgatcgccgcgttcataaaaaagcctaacaacattggcgctggtccgttgattgtcatacttaccgaggttaaagcatgaactaaatcaaaacctgaatacagttttttagcatcgtccaaacagcaaatcgaaactccggcattaccgatttttccataaatatcaggacgaatatcaggatcgtttccgtataaagtcacactatcaaaggcagtcgaaagtcgttttgccggtaatcctgcactcacataatgaaaacgtttgttggttctttccggtccgccctctcctgcaaacattcttgacggatcttcgccttcacgcttgaacggatacaatcctgatgcaaacggaaattctcccggaacattttcttgtaaattccaacgtaatacatccccccaggcttcatatttaggtaaagcaatttttgggatttgcaaatgcgataagctttcagaatgggtcgcgattttaatttctttatcacgcaccttaaagctgtacaccggatttttatatttggctactttttcgtcccaattcaggataatttcccaattgtacggatcaagatccatttttaccttatcaaactgattgagtaaaagatttaaaaagattctgttttcgtcgtgcgtttcggctgctttcactccttcgactccgctcaggaagacactagtgtcatctattccggctttattaatttgcggaactttccctgaaaccgattctatggttttaaagattccgtataatttctgtgctactttttgctgtgaagctgcgatttcatcataagatcggttgttctctgcaatttcagataaataacgggttctgtgtggcggaatcacgaagattttctcgctcatttccttggtaatctgaaaagtagatttcagctccgattgtgttttctctacaatcttgtccatgatcgctttataaagcgtgttcattcccggatcgttaaactgagaagcgatggttccgaaaaccggcatttcatccggatttttatcccacaaattatgattgcgctggtactgctttttaacgtcacgaatggcgtctaatgcccctcttttgtcaaacttgttcaaagcgaccaaatcggcaaaatcaagcatgtcgattttctccaattgtgttgctgctccaaactccggtgtcattacatatagagatacatcagagtgatccataatctcggtgtcggattgtccgattcctgaagtttcaagaatgatcaaatcgtattttgctgcttttaaaacctgaatggcctcagcaacatatttggataaagccaaattcgactgacgtgtcgccagcgaacgcatatacacacgaggattgttgatggcattcatacggattctgtcacccagtaatgctcctcctgtttttctttttgacggatcgacagaaatcaatccgatagttttctctgggaaatcaattaaaaagcgacgaaccagttcatctactaaagatgattttccggctccacccgttccggtaattccaagaaccggaattttagaatcggtattgctttcgtgaatctgatcaaaaataggttttgcgatttcagggaaattttccgctgccgaaatcaaacgtgcaattgccgttggaattttattttcgatatgatcgatttctccgtttaactgatctccaataggataatcggaacgctgaaccaaatcattgatcattccttgtaaacctaaagaacgcccatcatccggagaataaattctcgtgataccatattcatgtaattctgaaatttcgcttggaaggattactccgcctccgcctccaaaaattttaatgtgtcctgctcctttttcttgcagcaagtcatacatgtatttaaaatattcattatgtcctccctgatacgatgtcatcgcaatcgcattcgcgtcttcctgaatagcagtattcaccacttcctcaacactacggtcgtgcccaaggtgaattacctcaactccggttgactgaataatacgacgcataatgtttatcgctgcatcatgtccgtcaaaaagagaggctgcggttacaattcttactttatttttaggaatatatggtatttgttgttccattttatgaatatgataattttaagggagcaatttacaaaatattacaacatttgatcatgctaatatctttttgttaacaaaaaaaagaatcttttttcttttagaggggtaacaaattgaatactaagttgatttatcctatataagtctctgtggcaaaaaaattagcacaaactagtgtaattcctattgaagcaccaatttcacgaattcacacgaagtaaaaatctatttaatcgctccaatctgtggcaaaaaattagtaccaattagtgtaattcctattgaaacaccaatttcacgaagtagcacgaaataaaaatctatttaatcgctccaatctgtggcaaaaaaattagcacaaactagtgtaattcctattgaagcaccaatttcacgaattcacacgaagtaaaatctttctaatccatctaatctgtggcaaaaaaattagtaccaattagtgtaattcctattgaaacaccaatttcacgaagtagcacgaaataaaaatctatttaatcgctccaatctgtggcaaaaaaattagcacaaactagtgtaattcctattgaagcaccaatttcacgaatccacacgaattaaaatctatttaatcgttccaatctgtggcaaaaaattagtgacaattagtgtaattcgtgtttaggcacttattctgatagtttttctaaactcagaagggctatttcctttttgtttcttaaagaatttattgaaatggctttcatcagtaaaaccaaattcatacgctatttcattgattcgtttatcactgaattgcaaacgatgttcaatcaattttgttttataattactaatatactgctgcatggtttcatttgcatgcttcttgaagtaacgtcctaaataggtacttgaaattccgaaaaaatcactaatcgattctgccttgattttctcaggataataaatattgttttggatgtactgcaagatatccatcgctttagcttcgcagcctatgttcacctgctccggcagatacttcgcaatgttacgggcaacgacaataataagagtgtttaccaattgctgaatcaattcctgattgtaaacatctttatcttcatactctcgaatgattgcctctaccataacttttacgagacatttatcagcaacattttttaaaatacagcccggctgatgattcgcattttgcagaatatattctaaacgctgaatgttttcgttctgcagactagagttttttagataaatatcattaaacctcaaaaagaaaaaatttgttttggtctcaatggtaaaattatgacagtcttcaggtgtcagcaaaaataaatgtccctcatcgtattcaaaaacatttttattgatgcattgcaaaccagttcctttcaaaacataaaccaattcaaaaaagttatgacgatctcccacatccggatatacatctaaagtctcaaaagaaacactaaacggttcgtataaattttcttttttcattttgtctgttatttattgcggttgcaaatatacctaaaaaacacaaatatataccacttaaaacaattaaaaatggtataattttgtcaagtgattttttagcatcttttctaagaagttaaaaaaaaacatgcttcaatctattaccataatttatacacaaacaaaatttacaagaatatttacaaaatgaagaaaatttttattatcaacggcgggcaaaactttgcgcattcaggtggaaaactcaatcaaaccattacagactggactatagaatattttacaaccagcaataaatatgaagtaagaaccactcacgttcaggacgaaattgatcttgaagaagaagtcgaaaaattcgtatgggctgatttagtgatttaccatacgccaatttggtggtttcacctacccaatctttttaaaaaatatattgatgatgtttttagtgaaggtcacgagaaaggaatttaccaaaatgacggcagaacaagaacaaatcccgatcttaattatggtacaggcggacttttgcacgggcgaaaatacatgcttaccactacctggaatgctcctgcagcggccttcacgcttccgggagaatttttcgaagaaactacggtagacgaaggggttatgtttggtttccataaaatgaatcaatttgtaggaatggaaaaactggatggttttcattttcatgatgtagaaaaaggagctactgaagaaaatattggtatctttaaacaaaactataccaaccatttaaaacaaatctttaaaactatatgattatgatttcaatcactgctattttaaaaagtaaaccggaaaatacagctcaaatcaaaaacatgttaaaccatttggttactgagaccagaaaagaagaggcttgcattcgatatgatctgcatcacagcgagaatgtttttattatttgggaagaatggaaagaccagccaggccttgatattcataacaatcagcagtatctgcaggattttattaaacaaagtgaaggtttaatctcctcgcccattcaggtttacaaaacagtacaaatattataatcaaagttagcaatgagagcacttttaacgactacttacgaatctgattttgtaagtactgaaatagaaaaaccgactccaaaagaaggagaggttttaatcaaaattcatgcaagtggtgttaatcctatcgataacaaaattcgtattggggtttcaccctatgcctcacctgttttgccagcggtattaggaactgatcttgccggtgttgttgaagcagttggaaagaatgttaccgattttaaagttggtgatgaagtctacgggctcgccggaggtgttttgggacttcagggaacattagcagaatacactgctgttgacgccgatttactggccataaaaccaaaaaacctgactatgaaagaggcagcagcagttccattggtactgcttacggcttgggaaggtttaattgacagagcaaaagtaaaaaaaggagatcaggttttggttcatgccggagccggaggtgttgggcacatggtgatacagcttgcccgcatttttggtgctgatgtttatgcgactgtttctcctcaaaaagcagccatcgttgaatcatacggagcaactccaattgattataagacagtaaaagctgaagattatgtaaagcaatttacaggcggaaaaggttttgacattatttacgatacggttggaggtcaatctttggatgattcttttgctgctatccgccattacggccagattgccagctgttatgcttttggaacacatgcattggcgacgggatcgcttcgatctgcaagtttacatggtgtatttgttttacacccgatgattagtggtgagggcagaaaacatcatggagatattttaaaagaagctgcaaaatttatcgaagaagggaaattaaagcctcttattgatcccagaagcttttctttagctactgctatggaagcgcataaagcggttagcgatagttcttctgttggaaaaattgtagtagatatcgtttaatttcaaaatttaatcctttttgaatgaggatcaattttctgataaatcattaactaaaccactctgcactgaaagtgcagaggtttgttttacgagggactgaaagtccctcttcttatttcattctactccgttggcgtcaatgctcaatggacctgttttaattggggttacattggtattggctgcggttaccggctgtccgtttaaggtatcgttgattgttacgtttccaattgtggttgctgttgttgtacccggtgtttgaactgggtagctgttatcaacgttggctacgattgggtttttaacttcaacagttgccgtagctgtagcacagttggcaggggttgctccttcttcacagatttcgtatgtgatttggtaggttcctgttacagtgtttggatctaaagttagtactccgttggcgtcaatgctcaatggacctgttttaattggggttacattggtattggctgcggttaccggctgtccgtttaaggtatcgttgattgttacgtttccaattgtggttgctgttgttgtacccggtgtttgaactgggtagctgttgtcaacgttggctacgattgggttttgcacaataatagtaactgtagctgttgcacagtttgctgttggatttgcaacctcacaaatttgataatcaaaagtgtaagttcctgttggcgtatttggctgaattgtaacagctcctgtattagtgtcaaaatttaaatttgaaggtaaagttgtagtcgaagtaattataacttcattgctaactacatttttacagttcaaagagtcattatccagaacacttggaactgcgattccacccagaactccattaaaggatgttacacgatcttcgatagctttgattggtcctattactttcaccgtttgcgtacacgtctgagtatttccggcagcatcagtagcggtccaggttaccgtagtggttccgattgggaagcttgatggcgcttcgttagttaccgttactgttcctgagcagttatcgctcgtagttggagtacctaaaacaacacctgttgcagcgcatgaattagtatcagccacagcagtaacatttgaaggacaagtgatggttggtttttgagtatcgtttacggttacggtttgtgtacaagtctgcgtatttccggcagcatcagtagcggtccaggttaccgtagtggttccgattgggaagcttgatggtgcatcgttagttaccgttactgttcctgagcagttatcacttgtcgttggagtgcctaaaacaacgccggttgcagcgcatgaattagtatcagccacagcagtaacatttgaaggacaagtaattgttggtttttgagtatcgtttacggttacagtttgcgtacacgtctgcgtatttccggcagcatcagtagcggtccaggttaccgtagtgattccaattgggaagcttgatggtgcatcgttagttaccgttactgttcctgagcaattgtctgaagttactggagctcctaaaacaacgcccgttgctgtacatgaattaacatcggctacagcagttacatttgaaggacaagtaattgttggtttttgagtatcgcttactgttaccgtttgcgtacacgtctgcgtatttccggcagcatcggtagcggtccacgttacggttgtggttccgattgggaagcttgatggtgcatcgttagttactgttattgttccagaacagttatcgctcgtagttggagtacctaaaacaactccggttgcagcgcatgaattaacatcggctacagcagtaacatttgaaggacaagtgatggttggtttctgcgtatcgtttacggttaccgtttgcgtacacgtctgcgtatttccggcagcatcagtagcggtccaggttaccatagtggttccgattgggaagcttgatggcgcgtcgttagttaccgttactgttcctgagcagttatcgctcgtagttggagttcctaaaacaacgcctgttgcagcacatgaattagtatcagccacagcagttacatttgaaggacaagtgatggttggtttctgagtatcgtttacggttaccgtttgagtacaagtctgagtatttccggcagcatcggtagcggtccaggttaccgtagtggttccgattgggaagcttgatggcgcgtcgttagttaccgttattgttcctgagcaattatcgcttgtcgttggagtgcctaaaacaactcctgttgcagcgcatgaattagtatcagccacagcagtaacatttgaaggacaagtgatggttggtttctgcgtatcgtttaccgttacggtttgcgtacaagtctgcgtatttccggcagcatcagtagcggtccaggttaccgtagtggttccgattgggaagcttgatggcgcgtcgttagttaccgttactgttcctgagcagttatcgctcgtagttggagttcctaaaacaacgcctgttgcagcacatgaattagtatcagccacagcagttacatttgaaggacaagtaattgttggtttctgcgtatcgctaactgttacggtttgcgtacacgtctgcgtatttccggcagcatcagtagcggtccaagttaccgtagtgattccaattgggaagcttgatggtgcatcgttagttaccgttactgttcctgagcaattgtctgaagttactggagctcctaaaacaacgcctgttgctgtacatgaattgacatcggctacagcagttacatttgaaggacaagtaattattggtttctgcgtatcgctaactgttacggtttgcgtacaagtctgcgtatttccggcagcatcagtagcggtccaggttaccgtagtggttccgattgggaagcttgatggcgcgtcgttagttaccgttactgttcctgagcaattgtctgaagttactggagtgcctaaaacaacgcctgttgcagcgcatgaattagtatcagccacagcagtaacatttgaaggacaagtaattgttggctgagttaaatcttttaaaatgaccttttgtatcgctgtttcgatattaccattcccatcatcaaaactccaagtaatactatgtgttccctgagtattatatattagcggatctgtagtcgttccagtaatagttccagaacaattgtctgttgtggtaggtgctataactgtagcattgcattctcccgttatatctgctaaaactggtttcgttggtttttgagtatcacttacttttacagttgatactgctgaagtttgttcacagccagtcaaagtgtttattacttttactttataatcaccgtcttgagtgaccgttaatgtttgattggtctgaccagaaattactgtattatccttataccaaacaaacgtagctgaacttgcgtctgtaacagctgataatgttgtagttaaacaagctgttaaagcaccttttatgctcgcagttggtaatggacttaccgtgaaggtaacatctgaactgctagcagcacaacttccgttagaagcaaccgtgtatcttatcgttaccgctgtgctataagcacaaaaagacaatatcgttagaaaaaaagtaaatattactttaattttgttaaatccattcataaatctaaaagttaattttaataaaacgctacagctataatttttacaattgattatttttgacaaaaaattatatgtaagtttgacatgtcaaaaaacaagccataattttacaaaaatagcatttaaacctttgcatacaaacttatttaatatcgttttattatcatttttcctaactttaggatgtggtaatttatattcgcaagagataaaaaacaaaaaaaagcctttacctactgtaaaacaaacagataaacccaaaagcactacaacagagaaacctgaggttgccgtttcagacactataaagctggatacggttaaggcaaaaaagaattttctggacgctgttaccaaatacaaagctaaagattacgctaaatacgacaaaaaagcaaaaactcttaccttatataatgaagccgaactttattacaaagatgtcgaattaaaatcgggtatcattgttttaaacatggagaaggaagaagtttatgccggacgtattcgggattctgcaggtgttttgatacaatatccaaacttcaaacaaggaggcagcgaagttcagccagactctattcgatttaattttaaaacaaaaaaggcgctgatctataattcaagaacagaacaaggtgaatttaagattaaagcggccattaccaaaaaagaaaacgactcggtttactttttacgcggtgcccgttttacaaccgcaaaagacattgacaatccggaatactattttcagaccaataaagtaaaatttatacccggtaaaaaagtaattaccggtttaaccaatatggtcattgcagatgttcctacccctctggcattgcctttcgcctatttcccgatgagtcaggaaaaaagtgtttcgggtattattttacctagttacaacgattctaatacaagaggtttctctttacaaaacggaggatattattttgcattgagtgataattatgacttgacggttctgggtgactattataccaatggtagttatgccatgcgcttcgaatcaacgtatgctgcgaagtacaaatacagaggaaatattaatattcgttatgaaaatctgatcaacagtgagcgtggttaccctgattattctaaagaaaaaatctacaacattcagtggtcgcattcgaaagatacaaaatcaaatcctaactctactttttctgcctctgtaaacatgggtagtagtaagtacttcaagcgatctattaatcaggcgaacgctggatcgaatttaaataacactttaaattcttccatttcctacagcaaaacattcaatacaatacctcaagcacgtatttcgttaactgccacgcactcgcaaaatactcaaacggaaaaaatcgacatgactctaccaaccttacaggcaagtgtggatcgtgtctatccttttgttggaaaagacggcgttaaaaaaggatttataaaaaacatcaatttacaatataatttaagtggtaaaaacagtatctcaacaacagattccctgtttttcaaaccacagatgtttagagatgctaagattggaatgcaacacagtattccaattagtactaactttaaattgtttaaatattttagtgccggagcctctaccaattatcaggaaacctgggtaactaaaaccgaaaacagacaatacgatgctactaaagggcaggctgtaaccacaactgttaatggctttgatgcttaccgaacttataatttcagcaccaatttaggaactaccatttatggtacttttaattttggtgacaacaaaaaaattcaatccatacgtcacgtcatgagacccactatgacgtattcttacaccccaagttttgatcagtattacgacaattatacggtagacgcaaccggaaaaatcagcacatattccaggtttgacaatggtatttttggcgctcccggaaacagcaactctaatattgtgtcatttgctttaagcaatactttcgaagccaaggtaagagatcgtgacagcacaaaaacagagccgaaaaagatcatgttactaaacaacttaaacttcagcaccagttataatttcaatgctgacggaaaacaaactttagcctggcagccggtgattataagtggtggaacacagcttttggacaacaaaatgaatctgaacttcggagctgttttaaacccgtatgcgattgataatgcagggcaagtaatgaatgtcttcaatattgataacggagggagtttattccgattgacgagtgccaaccttactgtaaactattccttctcgaacaagggaggcggtgcacaggaaaagaacacacagagccagcgaaatggtggtcgtaatgacgacttgttcggaacaaatacagatctaaacgatagcagaaatagtcagtttgccaacgaaaaagatgatgacaaagatgtgataactgagtttttccgctctaaacttccgtgggatatgactatggcatactccctaacctactcgaatgccgccagagaaaataaaattatcggaaactcgatcatgatatctgccaatatggacattacacctaaatggaaaggcggagtttctacgggttacgattttgtacaaaaaggagttacttttacacaatttcgttttgaaagagacttattaagctggagaatggcctttaactggactccaattggtccaaactccaactggaacttctttattgggattaaatccggaatgttgagtgatattaaatggaacaagcgtagtacttcaaatcgataaaccataaatttaaaataatttataatgaaaaaaatcatctttaccgaaaaggcactggctccaattggtccttacaatcaggctgtattatcaggaaacacactttatgcttcaggtcagatcgcgatcaatccgacttccggcgaacttgtaacagacaatatcaatgatgaaaccaaacaggtaatggaaaatattgcagccattttagaagctgccgatatgtcttttgaaaatgtagtaaaagctaccatttttatcatggacatgaataatttcgcagctataaacaccgtttacggttcttatttcgacgaaaaaacggctcctgctcgtgaaactgttcaggttgcctgtttacctaaaaatgtaaatgtagagatttcaataattgcagtacaataaaatttgtttcaagtttcaggtttcaggtttcaggtttgacactttgagcataacctgaaacctgaaacaaaaaaaccgttacagctcgtaacggtttttttttatattctaaaaagaaattctatagttgcagcgcaatggcattaagcagtaacaggggtataatgattatgtacctacaagtaataagtataagtacaacggcaaggagctccaagacgagctggggctggggatgtatgattatggaatgagaaattatgaccctgcacttggccgctggatgaatatcgacccattggcagaaaaaatgcgaagatataatccttacacctacgctcttgataatccagtcttttttgttgaccctgatgggatgcaggcaacatataattggaaagagcataataagggaaataaaggagtttacactgatggagataaaaacgtttcatacgaggaggcattatcgcaaacaactgctggagaaagtaattcaagtgaaggtccaggagaccctccaaaaaaagaaccaggactaattaaacaatttttgctagccgttccagtcttaggtgctacgatagatagtagcgacaaaatagaagaaggagattacgttggagcttcactaagttttatggtgggggtgttggatttatttactttaggaacagctaataagtacaagactggtactgctggagtaatggcaggagttgaaaaagcagctgggcaagctgggaaatatggaggattatcagtagcagaaaaatatgggattaagtcatattcatctttgagaactttgataaaaggaaagagtttgcaagcgcaccatttgttagaacaacgatttgcaagtacattaggtgtaacgccaggaagtatgagtgctatagctgtaacagccgaagaacatcagatatttacaaatgcatggagggctgaaatcggatataaaggcagttctgcactgacaactactgcaaatgcaacaaaagagcaaatacataacgcggcgagaaaagtatataaagattatccagaaatattaaaagcattaggactatgataataaagtatcatgtagcacttgattggaatgattcgcaaatcgagaaaatgaacgaatttggtgtttatcctgttaagggatatacagccgttcaaattgatgaagaaacctatcttaaggtaaaagattatatttatgaatggactggaagcggaggaatacggtatcctgaatttagtaaagcagaacaaaaggagtctccattatccttaaaaagtggtgggcatgagcatggataccctatgcccgatatggatttcggatataaacaacttacttatgatttaagcgattactgtccaaattgtggagttggtttaaaacagaaagatgcgtttagagttaagagtgttccgccagaaggtaaaaagcaaatttttagtttaggttggatttatgatgagctttttgttgaaagaaaaatttataatgaagtatttgagccattaggaattaattgtagagaagttttaaagtataaaaaagaaaatccttttgaagaaactgttcaattagttttggagcaaacacaagaaaagttaaatctagtggattatccaacggaaacttgtcatgtttgtggaaagacaaaatatcagcctatgccacaaggattttatccattgtacaagaacattatagctcccatttttaaaagttgtgattactttggtagtggggcatctgcaaccaataaaatttttatcactaaagaattgagagaaaagcttattgaattaaaaatagagaaaagtgcatggtacattccaacaaaggcacttgatgagactacaaatctaaaaagcctagtcacaggtgataaaaaaactgaaaataaatagcattaactaatgagaattaccacaaaaccattcctggtagtgtttcaaagttagtgttatgagattttgaaattctaaccttttgaaatttaacaaattttagaagtgattaatttaaagatgagcagtaatgctcatcttttttgttttaatattgccttaaatgagcgaaaatgagtaaaaatgcgacatggtgttccaaagttagtgatggtatgaattgcccaaaatgtaaaaaacaaaaggttattaaaaatgggagaacaaaaaacaaaaaacacctgctgccgttgaagggcagaccgttttagacaatgttaaaggtttggtaactggaagctgggtaagagctctgactactgcctcagcggcattgggagaaaccactaccactttttacgataccagatcccgtgcggtgagaacccggactcaaaatcacttaggaggttataccaataccaacagcagtttagattttaccgggaagtcgctctataccattaccaaacacaaacgtacttccggagacacagaacttaccataagagaagaatacacctattcgccacaagaccatttattaacccatacccatcaaatcaacggaggaactgttgaagttttggcaaacaatacttatgacgatctggggcaattgagtgtgaaaaatgtggggaacagcgcaggaactccgttacagaaagtacactacagttacaacatcagaggctggcttaccggaatcaacaatgtcgaagagctacagcaggacactgacccgaaagatctctttgcttttaaaattaactatgacaaagtagaagcaaacgcaaattttgccaaagcactttacaatggaaatattgccgaaacttcctggataacaaattcagatgttactggtgcaattcgaatatatggctatcaatacgatcaactgaaccgcctgttggaggcgacttatcagactccaaatttagccgataacaaaaattattttggggaaagtatggattatgataaaaatggaaatattaccagactacaacgacaatatatggctggtgtgtcatcaaatccttatgtaggtgatatggatattttggggtatttctacgagaccaattccaaccgattgatgaaagttaccgataccagtaatcagctacaaggatttaaagacgatagtaacggatttaatgattcgggagatgattatgcctacgatcttaatggcaacttaatgaaagacgaaaacaaaaacatcacccaaatacaatacaatcatctgaatttacctaagaaaattacatttggaacacctgggagaattgagtatatttacaacgcggcggggcaaaaactcgagaaatttgtaaaggatagagatggtgttgtaatttataccgattatttaggcggttttcaatacagttatagcacaggtcaaaatattccggttgatcctgttgagccagggggtggagagccagatcctcctgcagcggatgatccgggaaatactgatcctcctgttggtcatgatgtagaccctgacccaaaagatccaccggcagaagcgtttaaagcctctcaaaacagccaaacataaatattgaattctatatatttgtttttaaagaatgatgaaaatgagcctccttaaaaaaacaaatataccacaaatacttttcctgttattagttttaagttcatgtggtaatgataaaaaaacaaccgccgataccacaactacaacagaagatactttaccgaaaatgaaaccgttaggtcctgaaaaaagaatttcgcaagcctatatcaattcagttgcaggaagaataaatcacttttacaataaaaactggcccaacaatacgatgaacggaagttttttggtcgcccgaaacggtcagattatttttgaacgttatagtggttttgccaataaaaacgaaggcaccaaaataaccgcagaaactcctgttcagattgcttctgtgagcaaggttctgactgctacagcagttttaaaactggttaatgccggtaagatcgatttagatcaaaaggtaaatacgattctaaaaacctttccgtacgaagactgcaccatcagaatgctgctggaccatcgtaccggaatgcgcaattatgcctattttacagacagagacaaatccgtttgggacagacacaatcagcttaccaataaagatatcctggacattttagcgaccaagaacattggtttggaatccagaaccggaacgcgatttagttattgcaataccaactatgcgatgctggctctaattattgaaaaaattacgggcttaacgtataaagaagctatgcaccaaatgattttcaaacctttgggaatgaaacacacctacgtttttgatgatgataaggacagaaagaaaattgttccttcttataaaggtaatggtgtagaaattggttttgattatttggacaatgtttacggagacaaaaatattttttcaacggtgcgagaccttttaaaatttgatcgtgccagaaattcacctgattttttaaaacccgccttactgaaacaagtttataccggatacagtaatgaacgtaaaggaaccaaaaattacggattaggaatcagaatgatcaattgggaaaccggacagaatttttatttccacaatggctggtggcacggcaatacttcttcttatattactttaatgaaagaacatgttaccattattgccttgtcgaacaaaatgacccgaaatacctatgcggttcgcaaactggcaccaatttttggcgattacccttttaacttcaaggacgaagactaatacagtagtcgtaaagtcaaaagtcaaaagtcaaaagtcgaaagtcaaaagtcgaaagtcaaaagtcgaaagtcaaaagtcgaaagtcgaaagtcgaaagtcgaaagttgaaagtcgaaagtcgtaaaatcaaaagtcgtaaagacctaaagacctaaagacctaaagcagttacaatattggctttgatctttttaaataccatcaattgtgcgaaaacaaaaagtaagcgtttgactttaaaaactttacaactttcgactttcgactaatacggaataatataattttctgaaaaatttattacaaaactaactgcaaatagtataaatttgcaaactcatttttggggtcgactggttttgacagcaagtcgaattgaaaagtaagcacgtcgagcattgagaccttgctcgtaaatataagatcttacaattttacacggcgaaaataactacgctttagctgcataatccgaattatagtaagattgcgccacgttcctacaaggtaggaaagctggattctccttgaaagccttggtttgtggcggtcagtacaggggaaccgtaaaaataaacctagatttccatgagcttcgggtggatatcgaaattaagaagataagtgttgagtggttgttcctgacctggcttaacatcgaaaatccaatcaggaaataaacgtgtagaaagctctttagttgcttgtttggacccgggttcgattcccggcgactccactataaccgcctgatattcaggcggttaaatacaaagtttaaaaaaagagaacaaaaagagaacaaaatttaagtaattgatttaatgtccccgcaagcattttaatttttaaaacagattaaaatgaaatcaatttactctactcccaaggtggtcaagtatgacgatctttcgaaaccttggtttgtctatttcagatataaccaaaagcttttccgttataaattcggaataaactatatcaatagttacaagaaaaggctaattgaagctaattcacttagagatgttttgcacgaaaaattgcgaactggatggaatccaaacattccggatgttgtcagcacttttagtaatatgacttttagcgaagcattagatttctcaattgaaaaaaaaactcttacactaggatcaaaaactttgtgtggctataaaagtaccgtaaaatttataaaaaatgctttagccccaacaaatacaaaaaacttacttattagcgaaaccaaaagagtacacgtaaaattaattcttgaaagaacgcaacagcaacgcaaatggtctaataagtcctataacaaaaatttagggtacttaaaagctatcctttcagaattaatacaatgggatatcatagaaaataatccagcacttggaataagagctttaaaagttagtgaagttaccggattcaaaccagcatcagatgaccaagtaaaagttatcaaagaaaaaatacttaatgattttcccagtttctacgcgtacataattacaattttccataccggaataagacctgaagaacttctttccgtacagataaaaatgatagacctgaaaaagtcacaaattacccttccacctggaataacaaaaacagacaaagaaagaatagtaccaattaaccaacacttaaaatctttttttgaagacatgaatcttcatatttacaataaagacttttttatatttggatcaagacgtgaacattcaaaccgaggtttaaaaaagaatttagatttcgttccaggagcaaaacaattaagcagagacacagcatctaaattatggcgaaaacttattaaaacagaatcaaatatcgatgtagatatgtattctttaaagcatcttggagcaaacaaaaaaatacttgcaggaattgagctagacgcactaagagaactatatggtcacacctcaaaaatgatgactttaagatatgctaaagttgtaaaagaagtcaataggcaacaaataattgaaaaatcacctgatttttaaagtaaacaaaacatttatattattgacttaaaattgttccattttagaactccttttgcgatacccatacttctaaaaaaaaaactgaaacttctatcgcaaaagatttagcggacagcccgacccggaggggaacgccataattagtttattaattttgtttttgttaaaataccgtcattttttgttttttaagatggtgtgatagatttttttaaatgctattgagtatttttgtttgaaacattataatttaagtatgaaaaaaactattgtattgttgacactgtttgtaatttcaaatttaagtgctcagcagcgccctaagttggtggtaggtattgtggtagaccagatgaaaatggaatatttgtatcggttctcagatgatttttcgtctaatggatttaagagattgatgaataatggatatacttttcagaatatgcattataattatatgcctacttacactgctcctggtcatgcgtctatttataccgggactactccggcaactcatggaattgtaggaaatgaatggtttagcaggacacttggtaaagatacctattgtacggatgatgctagcgtgaaaacagttggcgatggtactgctgaagaaggggcaatgtctcctaaaaacttactaagtactactattactgatgaagtaagaatggggacgaattttgaaggtaaagtgatcggaatgagtttgaaagatcgtggtgcgattttaccagcaggacattttgcgaattgggctttttggtacagtaagacaggttctttcatttcaagtactttttatggtgaaaagttgccagaatgggttgcggaattcaataatgagaagcgttatatgacatatatcaataaggggtgggatttatataagcctctttcggtttataatgaaagcttaccggataataatccgtacgaagggaagttgtacggaagtgcagcaccggtttttccttatgatttaaagggtatgtatgagaagaatgatgcgggggttttaagagctactccttatggaaatgacttgttggcagaatttgcgatgaaggctatcgaaaaggaagagttaggaaaagatagtataactgattttctaacagtaagtttttcttctacagattatgtggggcatttacttgggccaagatcgatggaacttcaggatacttatttaaggttggatcagacaattgctgactttttaaattatttagataaaacggttgggaaagataattatttgttattcttaacagctgatcatgcaggtgctgagaatgtaatctatttaaaggatcgaaaatataatgtaaacaattatccggttaaggatgttagaaaaagtctgcaggatttttcagtgaaaacatttggtgttgatttgattttaaattattcgaactttaatgtgtttttgaataagccagttcttaagaaaaaaggacttgatttggtaaaagtaaagcagagttttaaggagtttttgatttcacagccacaagttaaaagagcatatacagaagaggaaattttagcaaattccggaaaggattattatcttgattttatagcgaaaggttatgatgtaactcaaaacggagatttgattattcttgataaacctggaaatattgaatattctactacaggaacatcacatggaactccttatagttatgatacacatgtgccagctattttttatggatggcatattaaaaaaggagagtcatacgacaaaaaggctataactgaaattgcgcctacaatagcccaaaaaattaaagtaacttttccaaatggaacagaagcaaaagtgttgcaggaagttctggatgaaaaatagtttttctgtacttgaaatagagcctgtcatgttttgtgacaggtttttttatgcgtaaaaaaaaggcttctcaattaagaaaagccttttgatagtgtttagtaagcacttattttaatgttagcattatgcgtttgctaatacttcttcgttgaaaggtaaattccaagcttctgcaactcctttgtaaaggatttttccattagcaatgtttaatcctttttttaattcttcgttttcgttacaagcagtctcccatcctttgtttgctaattgtaccgcataaggtagagtagcatttgttaaagctaaagtagaagtgtaaggaacagctcctggcatatttgctacgcaatagtgaacaatatcatcgatgatgaaagttggattttcgtgagtggtaggagtacaagtttcgatacatccaccttgatctaccgctacgtcaacaacgacagttccaggacgcattaattttaacatgtcacgagtaattaagtgaggtgcttttgctcctgggatcaaaacggcaccaacaattaaatcagctgtagcgattgctttagtgatgttgtagtggttagacatttctgtgttcacgttagctggcatgatatcatctaaataacgtaaacgtggtaagcttaaatccatgatagtaacctgagcacctaaaccagcagccattttagcagcttgagttcctacgattcctcctcctaaaaccagtacttttgctggtggaacacctggaacacctcctaaaagaattcctcttccttttaatggtttttcaaggtattttgccccttgttggatagccatacgacctgcaacttcagacattggtactaataatggtaaactacggtctgctttttcaacagtttcgtaagctaaacatacagcgcctttctcaagcatagcatgagttaatggctctgatgaagcaaagtggaagtaagtgaataataattgatcttttttgattaatgggtattcagaagcaataggctcttttactttaataatcatttctgcaatggcatatacttcttcaatagttcctaaaactaccgcacctgcatttgcatattcatcatcactgaaaccacttcctaaaccggctgtagcttgtacgtaaacagtatgtccgtgttttttcatttcagaaactcctgcaggagttaatgctacacggttctcattgtttttgatttcttttggaacacctattatcattttgttatcttttttattttttgttgaaattgttttacaaaactacagatagagaatatattattgattaacgtggaataaataagaaaatattattttcaaattgattctttggaagtccgcaaattaaaaggattgatccgaagaagagaatcttatgcagcgacccgatacattggtttaaaagatgagaatacccactttttagatcttccgttttatgaaaccggacaggtaaaaaagaatccgttggggcctgaagacattgctattgtaaaggacattattgcacaaattaaaccccatcaggtatttgcagcgggagatttagcagatccgcacggtacacacgaagtttgtctgaatgccatctttgcggcgatgaaacaactgaaaccggaaaaatacatggacgactgctggttgtggctgtatcgcggtgcctggcacgaatgggacattcacgaaattgatatggccgttccgctttctccatctgaagtattactaaaacgtcacgcaattttgtaccaccaatcacaaaaagaccgcgtaatgttccaaggaaatgattccagagaattttgggtaagagccgaagaccgtaacaaaaacacagccgtattatacgacgaattaggattggcagaatacgaagcaattgaagcttttaaacgttttgattattaaaattacattataagatccgggtgagagtggatcgcaatgcaaaattcagattgatttcattaggagtagtgagggttcaatcgaaatcattctgagttttgcttttattatttattattaatgttgtgtaaaagcaacatctttccaaaaacaaaaaaaatgaaatatttattagtcctactattagcgggtgtaactgctagtgctcagattaaaaaagagcagttaaatcttatgccctggccccaaagcgttgtgttaaatgatggtaattttgcgttaaataaaaattttaaagtaaatattaccggaaatccaaatccccgaatttttggcggagtaactcgctttttgcgccgactagatggtagaaccggtatttttttcgaacagggatttattaccaaattaaatgaagtcccaacagctgaacttcaaatcaattgtactaagagtggaaaaattggtttgtatgaagatgaaagctatcatttggatatcaaaacaagcaaaattacaatcaatgcaacaagcgatttaggtgccctgcacggtcttgaaaccttattgcaaatgttgcagaataataacacctcattttattttcctgcatccaaaatttcagattttccaagatttacctggagaggtttgatggttgatgctgccagacattttcagccagtagatgtaatcaaaagaaatattgatgcattagcagctacaaaaatgaatgtccttcactggcatttggtagacgaccaggggtggagaattgaaatgaaaaaacatccaaaacttattgaaaaagcttcggatggaatgtattacacacaagaggaaattaaaaatatcgtaaaatatgctgatgagcgcggtattttaatcgttccggaaatagatgttcctggtcacgcatctgcaatacttacagcttatcctgagattggaagtaaagtaatcacactgacaggaggaacttctgaaaaaaatattcagggaaccgcaattgcgacctatggaattgaaagaaatgcgggtattttttcaccaacattagatccttcaaatcctaaaacatatcaattattaagcgaattatttgatgaggtttgtccgttatttccgggggcttattttcatatcggaggagatgaaaacgaaggaaaggactgggattcaaaccctaaaattcaggaatttaaaaagaaaaataagttaacaaccaatcatgagttacagacttattttaccatgcagttgattccgatgcttaaaaaacatggaaaacagttaatgggatgggaggaaattctgaccaagaacatgtcaaaagacgccattattcatgcctggagaggtcctaatgaaggagtagtagcaggacagtccttgattgaatcagtaaaaaaaggatataaaaccgtaatgtctaacggatattatattgatttattatatccgatagcaagtcattatctaaatgaccctatgcccaaaggcgccgatttaaccgctgaagaaaaagcgagagtattaggaggtgaagcaacaatgtggacagaacttgtgtcgccactaacaatcgattcgagactttggccgagaacagttgcaattgcagaacgcctttggtcagccgaagatattacagatttagccagcatgcgcagacgtcttgatgtagtttctttcagattggaagagttaggaattacgcatattcgcaataaggatgtgatcttaagaaatatctcgaacaatcagaatattgatttcgtagaagaatttacaaatgtttgcgagcctttaaaaggttacaaacgaaataaaggaggaactgagtatcaaatgtactctccgctaactctttttgctgatgcctgtacaccggatgctaaagattctctggcttttgacgatgcagtagcacaatatttagcaaataagacaccggagaataaagcaaaagtaacagcatttttaaacaagtggattgctgtaaacaaaggattggtagaattgagtgcaaatgcacctttgatacaacactttttacctctgtctaaaaaattgaatgatgcatcacaagaactattacttgttttagataacaaatcaactttaaaagtggatgatctgaaaaatttaatcgagctatgtaacagtaaagaccacgctgatgttgagttgtcagtatatgaaagtcttaaaaaattaatttaaagatttgtttgagttagtatttagtatgttttttttaccatgattatttagtaattcgttatctctgccatataggtttctggcagagataattgtggtagactttactacatctttaacttcggaacaattaataagcataaaattataaccaaaaaaagtattaacatttaaaaaccaaatagtaagtcgcataccacaaacatgacaaaaagtaaagtatttagattgatgaatcccaaatttatcttctgtgtttaaactaattttttttaaaattaaataaatatcagtcactactattcactcttcattagttcttcaacatcacggtaactaagtgtaaatcttagcttgaaatatactgcctgaagaattatgtattttggataacaatgacctttagtattcatcttttgaacggtttaaaattctaaagataaaagttattcccagatgcgacagaaccgaataccattccccactctgaatgaattgaaaatggcaaaattcaggggagttatagagtcttctttttactagatattatttcatccagacttaatggccctccaccagtaaatatagctccaaatagaaatagaatgtataatgtttgaggaagatacaaaaagtagctataccatgtaaaaggatccaggcctttagggatgtgattgggtatatcgaaggtgaataatgccgtaaataagataatatttaataccattgcactaaatctcgtgtaaagtccaattgccaaaagtaatccgaaaattgcttcatttgccgcagtaaaatcggctgtaaactgcggataagcaaatccaatcccagtaattgtttttaacattgatgcttgaaaaacggggttaaatagtttgttggcacctgtgattaaaaaaaatataccaatggcaattcggctaatggaatatgtacttagattatttttagtatcttgagaaaatgcaaatttaaacatagtatattattttaagtgattatctgtagtagcccttaacaacttgctactaagttataattaatagagtttcggtgcagaatttagtattggggtctgacgctggtgccagtaaggatatgccggtaatgtatcactggctttgtctaatctcttaatctggtcgagagttaagttccatccaactgcttctaaattttgtttaagctgctgttcatttcttgcaccaataataatactggaaaccgtcggacgctgtaataaccagttcaaggctatttgcgcagcgtttttaccagtttcttctgctaattcatctagtacatccacaatattatataaccgctggtcatctgcttctgcacttattagaggactaccgccttgcgctacccgcccatcttgtggaacagtttgatccctgcggtacttgccacttagttttccgctggctagtgggctccaaacgatggtgccaatgttttcttcaattcccagcggcattagttcccattcaaaatcacgattaagcaacgaataatgagcttgatggccgatgtattttgaccaaccataacgttctgatacagataaagatttcattaaatgccagcctgagaaattggaacaagcaatatatcttacttttccgctttccaccaaatgctctaaagcttttaatgtttcctctatgggtgtatttgcatcaaaggcatgcatatggtaaatatcgatgtgatcagtccctaatcgctttaaactatcctcacaggctttgatcaattttaaacgtgaagtaccgtagtcatttgcaccttcaccggtagcaaagcccgctttagtagagatcaacactttattacgcagaccttttaatgctttacccagtatttcttctgcctccccgcctgaataggcatcagcagtgtcaaacaaattaacaccagcttcgagacataaattgatcaaacgtgtggcttcatcaacctgagtattgccccaggctttaaaaaactcattgctcccgccaaaggttcctgtaccaaaacttaaaactggtactcgcaaacccgaattacctaattgtctatattccataattgattgaattactctttaaattaattaaaaaatgttgattttattagttaaacaaaaatacagcgggaagtattcccgatgttagaatctttgggacgaatattggcacttttggtacttgaagattatcggacgctattatctatgagttttggtatttatcatacatctgctttcgaaactctgcaggggtcagacctgtcctctttttaaattgccgggagaaataagaaaagtctttgaatcccagatcgtcacaaatctgcccgattgggtgaacgctatgaagaagcaatctttttgcttccaacaaaacccggtctcggataacctccccgagagctttttttgttacttgcttgcagatctcattgactctatgagcagtgagatttaatttgtcggcatagaaactaatttggctctcttttgtaaaattgccttcaatgagctttttgagttgtttgaacctaacaatattagtcagatcctggggtgatttatcgttctctataattaaccgttgtgtcctgtttaaaaagacagataacaaattggctacaatcgatggtgatttttccgtacgggtaatctcatttaacatcagattaagtaccggtgagagttcttcaattgccttgtcgtccaatttaaaaaaggaacttgcatagcagttatccaaaaaacaaaactcactaatagcatcttcattaggcatattcaataataagaactgttctgtaaaggtaattgagaaaccattgacagattccattttattcatcagatgcaattgaccgggatatataaaaaataacatattcggttcaaccgttacctgttgatagtcaatcaaattagttgatgtacccgatgtgagccacatgatttcataaaaactgcgcttatatggccattgaaactttgggggacgctgtaagttttcaaaacgttctagcatgaattgatcgtcaatagattgaagggatggaaaatcggatatattataagtttggatcatttacctcatattcttttcctacaaatatatctacttaagtggaaaaaatcacttcgattgaccattatctgtcaaaatgaaatgaccatttcaattcgttctaaatttatggtatatttagtagaactacataatatggtaaacaaaacattaaaaactcactaacaacaatttagactagaaataattccgaaattataatgatcacttttaaattcaataatgcctgtcaacgcattgcgaaactactagtcaaattataccgtgggagagtatgtcgtcgcctttcttttaagaaccctatccaaatcggatagggttttttgttttataacgtttttaaatctttgcgctctttgcggttaaaaaaaattgtgcacggatgatacagattcgccaggcgaaaacgcggattgaaacggatttttttgattggcagaaattcaaattgcttttgccctttcagggcgaaaatgacattatttttatttatttcatggtgctttgcgccatgctctttgcttttggggctttcagcccttttttcttgcgtgctttgcgtaaaccttcgcggactttgcggttaaaaaaataacacacggatgatacgaattcggcaggcgaaaacacggatcaaaacggatttttttgatttgtagaaatgaaaattgcttctgccctttcagggcgatatttgctgttcattttggttcatacgtagtgcctcgcgccatgctctttgcttttcgggctttcagccctttttccttgtgtgctttgcgtaaatcttcgcgctctttgcggttaaaaactatagtcccttttttctttaaatattctttttatcgttgacagcgttagggatgggagtgatatccttttgcgatgaccgtatatttaaaaaatccctgaaacttctatcgcaaaagatttagcggacagcccgacccaaaggggaacgccataataattaactaacacgaaaagatgaatatgcaaccgtatagagaatgcgtagttgagatgttttttaagtgtttttagtactttatttttagttttatcttgagagtaaggtttcttgcttgttttagatgagaaaagcgatttaaatcgcctgttttgaagtggtttttatgggaagtagtatagggttaaattgctacatcgtagccaacttttaccttgtccattattacatgagtgtagaaatgtttaacattaggatcgtccattagccattttttggcaaaagattcgtaatgctgcatgtcttttgtgtttacaataatgacaaaatcataggtaccggtgacgaaataacattgcatcacttcgtggcatttccgcatagagttcttaaatttttctaaggcttttgaatttccgtccgctagaataatgtctactacgcaagtaatcgttaagccaataatgcttggtgctattatcgatatatcagcctctattattttattttctcttaatcttgctaatcttctttgtacggctgaactgcttaaattcactaagtcgccaagttcttgcgcagtcaatctattgtttttttgaatgtattgtaaaatttttttgtcgtattcgtcgagtgcttgcattttttacctgattttcaagtaaatttaggttaaattagttatttgtagtatttatgcgcggaaataaagcaggaaggtataagtagttttgtgttgtaatatttaacataaaagaagaataatgaaaagaaatgaaagtgttttttctgaagaagaaattgaaaagtttagaagtgaaacaattgggtgtgaaaatgtaaaccatcttaacaatgctggtgcaggtctaatgcctgatgtggtaactcgatctattttggaacatgtaaagttagagtctgaaattggggggtatgaggctgcagctttgaaggcagatgtaataaaggaattttacgctcaggcgggaaaattagttaattgtaatccgtcgaatattgcttttactgcaagtgctacggattcttatacccgtgcgttgtcttctattccttttttgatgggagatgtaattttgactgataatgatgattttatttcgaatcaaattcagtttatttcatgtcagaaacgatttggaataaaaatagtaagaataaagaatgctgaggcaggaggtgttgatctgaaagatctcgaggaaaaattattttctcttcagccaagattactggctataacgcatattccaaccaattccggtttggttcagcctgttaaaagtataggtgaaatatacgatcgttatgccaaagtgcatattgataaaacctggtatattttggatgcttgtcaatcagtagggcaattgaaattggatgttgaggaattgaaatgtgattttttaagtattacggtaaggaaatttttgagaggtccgcgtggcactgggtttttgtatgtttcggacaaggttcttgagtctggactcgagcctttgtttattgatatgagaggtgctgattggattgaaaaagatgaatataaacaacaaccagatgctaaacgttttgaagattgggaatttgcttatgctcttgttttgggaagtaaagctgctattgaatattgtttaagtattggggaggataaaatttggaggcaaatacagttgttgtcaaaatatatgagagacgaactgactaaaatttctaaagttagggttttggataaaggacctgaacttggaggcctggtgacattttttgtcgaggattctcaaccaaaatatattgttgatgagttactgaagagaaaaataaatgtggttccgagttttagaaatttcgctgttattgattttgatgaaaagggggtaaaatgggcagtgagagcatctcctcattattataatactttcgatgaaattgatttgtttgtcgaggcagttaaggaaattgtgtctgtttagtatcgctaagtcgtagtaataaatagtacaaaaaaactccttaatttcttaaggagttttttgtgggcgattaggggttcgaacccccgaccacttccgatgaaaaatcggaatgctctgagtcagctaacctaatctttattttatgttagctcttgaattttaattcttctactctgcgaagaattcttatattctgctgtacaattttttttaacttataattttctaataaatagcaaaaaaaactccttaatttcttaaggagttttttgtgggcgattaggggttcgaacccccgaccacttccgatgaaaaccgcctatacaaatctctccgactactcctatagcttgtaattcttctttttcgtttaaaatataaatctgcgtgtttgcaataggacatcctattaaaatagattccttttcaaatcctatttcctttatcgtacatccaaccgtcgattcggtcggaccgtattcgttataaatactaattgaaggatttaaggatcttagtatctggacatgactgtcttcaagtttctcacctccaactattgctaattgaactttgctactgtttaactcaaattgcccaagcaaactgatatgggcaggggttaattttatacaacttatttcgctctcaaagtattcttttattatacttgaaacatctgacgtattgctaaaaatggttagtactcctccacttatcaaaggcaagtagatacttgtcactgttaaatcaaaggacatagacgtaaaaagcccaaaatttaaaggcaatgaagcatttgaatattctgattgaccccacgttagataatttgccagcgatgcgtgttctaccatcactcctttgggattacccgtagaacctgaagtgtagatcacataagcaagatgattttctttagtggtagtcatcattaatgccttagaataactctttcggctttctttgaatttgcttaattcttgctcatccaggcaaaccttatagtgggtatcctctttaatatagtctattctttcctgagggtattccgaatcgataggaacataagctcctcctgcctttaatatacccaatatcgaaacgatcatccactcacttctctccaattgtatgactatcaaatcatccgactgaatgttgtaatgaattcttagataatgagccagctgattagatcgctcactaagctctttgtaggtaaactctatatcctcaaataccacagctatattgtccggggtctttgcaacttgttcttcaaacaaatcgacaatcgttttatcttttggataggaaaccactgtatcattaaatgtaaacagcagcttatgtttctcttctactaatacataatctattttcgaaattttctcctcaggacaagataatatcgaatttaaaagatgtttgaaatgttccattaagcgctctatcatctcacgctcataaacatccacattgtaaattaaattgaaataaatataatctccaacctctccaaaatgcagttctatatcattcttaaccttcaaaagtccattatccgacacctggtttataaccgtatcatccaatatcctcaagtcttcattttccgtaatattatgataggtgatcgagatatcaaagattggacttctgcccgtatctcgctgaagtcctaacccttctaccaattgatcaaaggggtacatttgatggttatagctctttaaagtatgctcttttacagactggtaaaaatgatcaaagctttcctgaggattaatctcattttttaaagccaacgtgtttacataaaaaccgatctggtcttccaaatcagcatgatctctacccgctacgagagttcctatgatgatatcctgctgagcggtataacggtacattaacacattccatgaggccagtaagcccatgaaaagactgccgccattctcctgcacatatccctttagcttagctgttgttgctttgtccagataagtggctaaaccatgaccgttaaagcttttaacttgaggtcgttgtttaactcccggcaaatccagtaatggcaattctcctgagagattgtccagccaatattctctatgtgccttaaatgactcctggtccaattgggctagctgccaggctgaataatccttgtactggattctcaattcctttaaatcaggctcttttcctgccctgtaggcttcatagtatttgaatatatctttggttaatatctccattgaccagccatcactaataatatggtgtatgttgaagtagaaccaatattccccttcctctacctgaagtaaggccgctctgagtaaaggccccttcgccagatcaaatacgcggtaagaatcggctgcgatataggcttctgctttttcttgcttatcagcttcttttctaaaatcctgatagtcgattgaaaagtttaaatctcccttttccagcacccattgcctgatctctcccgactcgtcttccctgaaaaccgttcgtaagatctcatgacgatcaattgtagtctcaatagcccgcttgaagttttcaatttcaatgccttctttaagataaagacttccaggcatattataagctgtcgagcctccttcaaactgactcaaaacccatactcttctttgagcattagatatgggataacttgcttgaagaattgacttttctattggaacaaactcctctctttttgaagaggctatcagttctgcctgtgaagctatactggtatgaacaaatacctctcttaaagtcagctttacccctaactccttttgatactcattgctcagacgaactgcttttaagctatgacctcccaatgcaaaaaagtcatcattgatcccaatgttttctcttttcagtacttcttcccaaatctttaccagtttctcttccagctcatttcgtggcgctacataggcaacaccactcgataatcccgcaccctcaggattcggtaatgcttttttgtcaattttaccattggccgttaatgggatgacctcgagttgaacaaagtacgccgggagcatatactccggcaacgactgttttaaataagttcttaaatcacttgcgttctgctcaatattagaaacaatatacgctacaagttctttctctgctgactcgttctctctggctaaaacaactgcctgacttacagcttcatgttttactaaagcatgtacaattgagctacagccgtcgtgtagaccgtccgagtttagaacagacaaaacctattcgtgagttttctactcctttaattacagcattaggaaatcctgaattaagacctcagtttacgaattctgttgaagtaaattatactaaaactttcgaaaaaggaagctttactacaggtgtttttgtgagaagcatcaacgaccaaatcagcagagttttacttccggacgatacagatccaagtggtaacaaacaaatcctgacgtatgccaactttgaccgtaatacctcttatggttttgaagcttctttcacttataaaattgcaaaatggtgggacatttcaccatctattgacttttcaagcattaaccaacaaggtatcgtgtttgtatacgatcctgtaactcaaaaaagcagtccgctggaaagaaaaatcacagtaggtgctttcaacggacgtatgaattctaactttaaagtaaacaaacgtttaagtttcttattattcggattttacagaggagaagttgaaggtcttcaaaataacagccatgctatgtataaaatggacatgggatcccgttataccttgttaaacaataaaatgaacatcagtttgcgttttaacgatgtgtttaacaccatgaaatacgctttcgattctcagtatccttattcacactcagggcaatttacatgggagagccaaacagtttacctagggttaacttacaactttggaggtgctaaaatcaaaaacctgcaacgtaaacaaagagaagacaataccaataaaggtggaggcggattgttctaatccaacttttgctaatcgattttaatagttttttaaaaagcccggagtttgccaacttcgggcttttttttatggatatttggcacatttagttaaaattgaatcgctgtttttattcctgccatacttacaataataagacacgcctcctttgtaacctccttattctactgaagaaaatgaaaatccatccggaagctaaacctacaaattgttaaaattatcaaaaattcaaaaactaatttactctaaaacagcgcatcacaaaaaagacatttctgattttaatttttactgtaacatcggattgaaaagacggtctctagtgatacattttgaagtatttcaaaaagaaacaatcatcaatcaaatcaatcacatgttcatgaaattaaaattacttttattagtcttactgactacaatgacaactctgcaggcacaaacttccggaactgtttctggaaaagttaccgaaaaatcaaaccatgctcctatttcttatactacagtttcgcttaaagacaatggaaaaattgtcttaggagttaacactgatgataacggcgattttaccattaaaaatctggctttaaaaaattacacgattgaaattcaatatatcggatttaagaaatacacgggatctgttgttttaagtgaagatcaaaaagaggctagtcttaaaattgctcttgaagaagaagcgacacaacttaaaggggttaatgttattagcgaacgctcaaccattgagcaaaaactggatcgaaaagtaatcacagtcggtaaagacctgaccactgccggagctacagcttctgagattatgaataacattccatctgttaatgtagatcaaaacggaaaaatttcgcttcgcggaaatgataatgtccgagtattgattgacggaagacccagtaatattgatcctgctcaattgctaaaacaaatcccgtcaacctctatcaaaaaaattgagctaattaccaatccaagtgccaaatacaatccggaaggaatgtcgggaatcatcaatgtcattttgctcaaaaataccaatataggttttaacggaagttacagcggagggatcacttttggggaagctaccaaacacaatcaatcgctgaatttgaattacaaaaacggaaaagtaaatttttatggaaacgccggtcaaaatttaggaacctattttttcgacagttctcttcaaagattcgatcaggatctttatcaaaaaatagactttaaatcgaatgccgactctcatctgtataaaatcggaatggattatttcgttgacgcgcagaatacgatttctttctacacgaatcaaagcaaatacaatcaggacgtatttgttgacgctaatatcaactacaacaataatcctgaaatcagcaacatctcgcaaaattccagatacttaggccctcaaaaaatggaaacttataatctggcttacaaacatctctttaaaaaagaaggccacactttagattttgaaggaaacttcagtaaatacaatgcctcgcaacaagcccattttgacacccaaaacagtgctcctgacaacactgtcaaaaatgtaaattatacagatttaaacaaaagtcatcgtaaactcaatacatttaatatagattatgttaatccgttggacgaaaaaacaactttggaattaggtgccgaagccagaatcacaaaatcagcaaatgattatgccagaataaaccctgctgacccaaccgaggatcagctgctctattacacttacgatacagatatctactcggcttatgtaacattcggtcagaaattcaaaaaattcagttatcaattaggtgcacgttttgaaagctacaaagcagctgccagttttaatcatggtcaggatacgtttaatgacgattatatcacgctatatccatctgctcattttacttataatttaaatgagaaaaacaccatacaattgagttatagccgtcgtgtagatctcccgagtttagaacaaaaaaaaaatattcgtgagttttcgacacccatggtaacgacattggggaatcctgaagatatagattttttcgcattactaaagtactgcaataaattgcagggttttaaacccgaatctgagaccaataaaaaaattacaatctttaaacgttttgatatcgataagaaattatttacccgataagatttaatattgtttttaactctaattttatcgataaagtcaaaaaaacatcgccaaaatgcatgttatattactgatttagatatatttgcaaaaaacaaaatccatcgacactaaataattcactttctttcacattgttccaaaaaaataaaaataccatcaagaccccttttaaattcattttcatgaaagaaaaactagctattgtaatgctattgactttgttttctattcgtgcctccgctcaaagcgaaaaattatatcaaaccgataaagtaagcgataaatatgcctatgttgatgtgatgaaaacctacgaaagggttgcagcaaaaggctataaatctgttgatttatttcaaaaactaggaaattcctgctatgctaaatgcaatctggataaagcagccaaatggtaccgcgaacttttcgccctcaccaccgatttagaacccgaatattattaccgctatgcagaatcgctgcgatcgatttctctatatcaggaagccgacgctcttattgaaaaattaaaaacaaaagttccggtaaaaaagaaagcttaattcgctaaaaaaacaaccacaatcttgtcatttcgacgtaaggagaaatcacaatcgaaactctacaaagattggcgacttactttgcggaaatactgatgtgatttccccccgctagcgcgagcgtcccgctcgtgaacgtaaagtttttcttatattagcccaaaactactataatgagcagaaaatataagtttagagaaaaagtaggagcttactttataagttttgctaccgtttattggatagacgtatttactagagaggaatattttggaaatatcattgaatcattagattactgccgcaaacataaagctatggaaatatacggttattgtattatgccgagtcatatccatttgatttttagatctggagatgcagatccttcaggattgataagagattttaaaggattcacatccaaaaaaatgctgagaacaatcgaagaacacccacaagagagtagaaaagaatggatgttgtggatgtttgagagagctggaaagaaaaacagcaatatcaaattcagacagttttggcagcaaaacaataatcctatcgaaatctggtcattaaaagtctttgagcaaaagctaaactatattcatcaaaatccagttgaagcaggttttgttactaatcctgtagattggaaatacagttctgccagaaattatggcgataacgatcaaactattttactaattgatataaattaatattctttgtgtgcacgagcgggacgctcgcgctagcggggggcaaagctgaaaattctaacgccaaaatctcgcaaaggcgctaagtcgcaaagtttttacgcaatcttgtcatttcgacgtaaggagaaatcacactcgaaactctacaaagattggcgactttctttgcagaaatattgatgtgatttctccttacgtcgaaatgacaaactttatgaaattttactctttgtgtgcacgagcgggacgctcgcgctagcgggggattttctttgaggaaatactggcgtgatttgcttcggacgctcgcgctagcaggggagatggttgatagggattcttagagtttgactaataaaattaaaaaacagttcttacaagaactgctttttaattttacctttttttatctattctatttacctaacaaccttttttctgctttactatgatcgtagtccggtggagtgttcttgaattttacagccttttgacctgtaactcttgttgattgaaattctcttaaagatctcaaatcaatatctccgcaaagaataacgttattagttcctccttttaatctcagaatatctttaatttcggttcttgaaggtttagtaattcttgaatcaccaaaatctgatgaatttgcttgaacaaaataacagtgaatatcccttgtaacagtatctacaatatttgaaaaataatttatgtcacgattgtattctgaagcaaataaaatatcaacctcagatctaaatattgttctatgagttatgttggctaattcataacagttataaattgaaaaatgaattttattccaaatgaatttattgtacgtagcctcagttggttttggaacaactttcccttgatcttttattgttttttcctcatgaggagaataatgattttttaaacgaagcactaaaacggcatcttttatccctccattatttagaggaagtaaagttattgtaaaattgaaacagatatcattaattgtaatatgctctaaccccgcaattaaaaccctatcttttcttcttgattcatcagccaaaagaggaaaccacctatgcggaacacttagctctggtaaaataagaaaatctgctttattacgttcagcatcatttaagatatttaaaaattcttttcttcttgcttttgatgtatttggcgtatttttaaatgatttcgcaatattatctttttcaactagaatgtttgctactgcaattttcacattttctttaagtaaattacccgaaacttccaaaaaatcatataatacttttccagatctattatgttctttcttattattaaagtaattcctttttaaaatatttaatttatttattttttcagcttcagttttataacgatggggatttctaaaataataattagcattataaaaacattcaaaagcctgacttgccgattgtgctgtgaagccaccaaaacgattggcttctaccggtggatcttttactggatccggagtaaaaataggaggatcagtgtcgcccggatcatcaggtgcaggaggttctggatctccaccgccctcgcctgggtcaaccggatcaaccggaatactttggtcctcgctatacctgtactgaaatcctcccagataatctgtatgcgttgtaccgctggcctcttttacaattttcttcagtttttgccccgctgcgttgtaaatatactcaattgatcgagggcttgcaaaggtaatttttgtgtaccgctatttcaggactagacatttcaataaataaaaaccatacaattgatacactacccaaacacaacatttataacgctgatttccctcagattgaaatccattttttatgcatttattattgcaagaattacattttattttcatgacctaatttgaaacactaagttaaagcaaaatcattttaaggcttattaaaagacaaaaaacgaaagaggcgaccaaccagtcgtctctttttctattcaagaattaaaatgttatattctttttcagtccgttacatctttattttgcaaaaacacctaatctggaacattacctaaaaccactagacataaaaaaaacctaacaccaaattattcatccagttgttaggtttttattttgattaataatttaaaactactttttatagccaaagctatatttttttcttactagttaccttatctatttttctggttcatacatcttttcttggattaaatttaaaaaaggtttagaatcttttttctttactccattaattttgatgccaaaatgacttcccatgcaaatggtatctgtgattttaccattatgaaaaattatttgcatacgcacatctatttcattttgctttttttcagttttcaatttttcatattcctttgtgaatctctcgatgtattctctatcttctatttttttatattttacatcatctctaaacatttcacttcgtatagatttacaattaagtctaaaaggaaaaagtttattccctttgaagtaaaaaaattctaaatattgattatcagctattgaaggttcattttttatattacaatttaaggctgaaaatataataattgttaaaaatatgcttttcataatttatatagtttattactttttgtatttttcaaaagaaggattatagaatattccttggttagccatcttctgattaaattgcacggttttggatgcattaacgttagttgatgttggagagtttgtgatgactggtaacccttgatgattatttctagtaacttcaggagctgcaacttctccatttgccctagctgttctttgttccgaaccagtgacaactcttttctcttctttattatcatactgggcatcttctttaccaagcctaagattcattttaacttttccttcagctgcatatttacctgcgtggtctccttcatggtctagtacagttgctggagataaaatatttccactcgttgtctctaatcccatatttggattccattttacaacattataatcacctgaattcggagctaatgaaggttgatcagtagttgtaactccatcagtttgttgaacatccaccattaaattagggttttctgcaactgactttagaccttgcccaccaccattattaacatcgtaattataagcgcttacaaaatcccttacaaattggttatcaggtagaactgtcgcacctccattaaaaataaattcttgttgttttccgtttttatcaacataattaattctccaatcatcaggtgccattccatcagggtctgtaaaactcattggattattaaaacaataattatatggactgtgccttctcatcttctccgcaagtggatcaatattgctccaacctgctcttgcagggtcataaaatctagatccatagtcgtacatgttaagtcccagctcgtcttggagctccttgccattatacttatacttattacttttagttacataatcattgtatcccttgtgcttcaatccaaaaggataataattattctcgtcaataatagtaagaacttgcgttgcgggatttttagcgtaactcaatcgtatgttacccaaatgatctttgtactggtacacatattttttacctatgtaatcataatacccctctgccgtagggaaaaactctaaggttggtcgcgatggagcggcctgacttgccgattgtgctgtgaagccaccaaaacgattcgcttctaccggtggatctttaggaaccggatcgtatccatcaatagggggatctctgttccccggatcatccggtgcaggaggatctggctctccaccgcctggctcaacaggatcaaccggaatactttggtcttcgctatacctgtactgaaatcctcccagataatcagtatgagttgtaccgctggcctcttttacaattttcttcagtttttgccccgttgcgttgtaaatatactcaattgatcgagggcttgcaaaggcaatttttgtgtatcgctatttcaggactagacatttcaataaataaaaaccatacaattgatacactacccaaacacaacatttataacgctgatttcgtgagattaaagattacatgaaagataatgcacaaaatcaattgttagaatctgaaagagtaaaagagaagattcgcaactttgaacaggatatgtggagctactaagaaattagtaacattataccaaaaactcttattacatttgtagtaagagttttttattttacccctttacaaatgttggattatataattgtcggatctggattggctggaatttcatttgctgaaattgcacttaaaaacaataaatctatagtagttataaatgatgaaacgcaaaattcatcaagagttgcgggaggattgtacaatccggtgattttaaaacgttttagtgaagtttggaaagcagaagaacagttgtccttaatggaagaattctatgagaccatcgaaggtaagctgaaaaccaaggtgaattttaaacttcctattttaagaaaatttttctctatagaagaacaaaacaattggttctcagcttcggataaaccgcttctggcaccatttctttctaccaaattaatctttaaaaaatacaatggtatcgattctccgtttgattacggtgaggttttgcataccggttatgtcgatacggctttattgttggataaatatcgcgagtatttacttcaaaacaaattattgcttcaggagtcgtttgattatgctaagttggttattgaggaagattttgttcagtataaagaatatcaggctaagcatattgtttttgcggaaggtttcggactgcatgccaatccgttttttcaggatttgcccttagacggaaccaaaggggagctttttattatcaaggcacctgatctggatctggatgtgattgtgaataccagcgtctttattttgcctttaggaaacgatttgtttaaagtgggagcaacctacaattggaaagacaaaacggatgcgccaacagaagaaggaagaacagagttaatcgatcgtatagaggaaattatcaattgtgattttgaagttgtttcgcattttggcggggtgaggccaaccgtacgtgaccgtaggccaattattggtacgcacaatcaatacagttcattacatcttttaaacggattaggaacgcgtggtgtaatgcttggcccggccatggctaaagatttgtatgagtatatcgaagatcaaaaacctttagatccaacaattgatattcatcgtttttacaagaaaagaaaatagttttatttcgatcctgcttcgggatcataagaaacaaacatgttaatgtacaagttcctcgaaagtcttaagacaaatgggaataatagaatcaacgttgcaacaatgatcagaaaagactcttcgactgaggttttgaaaagtacaaacgaaacgataaaagctgcaattccgactgcaacatttaaaccataactaacatacatggcgccataaaaaaacgatggttcgatctggtattttaatccacagtgactgcaattttcgttcattttaagaaccttggtcaaatgaagcggatttcggtcagagtacatgctttctttgtgacatcttgggcagcttcctgttagtatactgtatagtttagatcctttttttaacatggttgcaattcaattaattgttgatgttgtagagaatcaatttttgttttagagtaaaacattttgattctgataaaaatagttaaaatttatcttacgaagaagagtagaacaaagatactattttagtttgtattttttgtattcaggatggtatgacttgttatggggggtaggttgatgtttttgataatggattttaatttgttaataaatattatcgcttttacggaaacccacattttacttaatttgcttttttgtatcattgtatgttttattttaaaaaaaaaggattgttttaatggcgataaatttgcgtaaaggtcaaagaattgatattggcctgtcaaggattaatatagggttaggttgggatccaaatgagggtacaggtcatagttttgatttagatgcttcggccataatgattaattctgatcgtaaacttatagacgaaaattactttgttttttataataatcttgcctctcccgatggtgcattagaacatacgggagatgatccgacaggaggtaatagtgatggtgatgacgacgaagctattaaggttgatttgagtaaaatttttgcagaggtaaatgagattctttttgtggttactatagaagactttgaaagaagaaggcaaaattttggtcaggtaagaaattcatatattcgaattgtggatgaagctacaggacaggaaattgctaaatatgaattagatgaagatttttcgattgaaaccggtgtagagtttggaagattatacaaacgaaatggacaatggaaatttgaggcttccggaattggctacagagctgatttaggattctttttagaaaaatattattcaggagaaataattaaatagcttttgattttttgatgctaaggagttttattggattaaaaaaggtattgataaagaaatgagtttttgcaataacagaagtatatgccgacagcagcaaaaatgatcataataagagttgtgaattaataaattataataagacaggaatttctgtacgtcaggtgtcgtcaatgtggcagaattaccggagttgactgttcttaaataatatgtatgaccactagctccataaaaattactaacgaacacctgtacctgataggtagctccaggagttaaaccagtcacctccatattattcatcttagtactagcaacacaataccagcctgatgtgccaatttgatctcctaaaccaaaagcagtattagcgttataattaacattatctagcggaatggcattagagctggtgcttgttcctttgcggataaatactgcactaaaagttgaattcccaggttgccaactaatagtcgattttgttgctgtagtattcgtaaaagcaagattggaacattgtactgtaggcggagtctcctgcgccaacatcgtctgaaaaaccgacaaaaaagtgatcctataaaccaagaaaatctttttcgaaaaaaagaaagtaaaagtacgagtcatatcaaaatgttttttttagctattaattataggataattcctaattatacccattggtaaaataacacaaaaaaaacatacccctttttcaaaagtaataaccgtaacaatattatcaacaactggcatggtattttaaacaatcgcaaaaacactcttaaaaaatcaatgttttgaaataaaagtcgatccaaaactattattgtgactcctattaaaatctgtctcattgtacttttgaattacacctaaaaagagaattcgatacgtaagtccacaactaaaaccacacgctataatttaaagagagattttaaatgatttacctccaaaattattccatgatacacacaacacattgaataccaattaaacacaagaatacaaactatttaaaaaaagcaaagtttaaactaaactttgctttttttttacttttaaactagatcgttgttaccttcgacaaatcgacaccaacacctttaagggcagcataagttaacttgtccattaccgctccgtcaaaacagatggtctgaagtgtcttataatatcggtttgtcagtgcaaatgccggacggaacgaaacatttctaaaaacggctcctttaaacgaaacgttattcaatgccgcattagagaagttcacatccataaaaatatgtccgtcaagacaaagccccgacaaatctgaatatttaaagtcaaccccattaaaaatacagtctacgaataccgtttttcgaagatcagctctgactaactttacatcaaccaattctgcatccataaactttactccgcctaattctgaagcactgaattcagtacgcacaagtgtggctttaatgaaactggcattggaaagatcaagtgcagaaaaagtacaatctgtcaagttcgctccggtaaaattagcttcacgcacatcactgcctttaaacaaactgcctgtcaggtctgcatttgaaaagtcactgtcacgcaaatcgcttccaacaaatttcctattggccagacgaactcccgctaagtctgtttttgcaagggcactgccactaaaattgatcaataatggccgctccggtctgtcagaagtatcggcttctttagattctttttgttcctgctccttagtagcatttattactttggaagttgacgcattttctgacatttgaagattttctgaaaaaaaattaaggtcaacgtttaaaatttctgcaagtcggtctaaagtagcaatatccggaaaggattctcctcgttcccattttcccactgcctgcggactgataaataaaagttgagcaagttgcgcctgagacatgttttgctcttttcgtactttggcaatcttgttgccgattttgttagctttcataaatactatcttttgtgataccgcaaaattagtttgacctattctctaaaaccttaaaaacaaccctccctatagttgtaatcacgctacttatagttgtatctcgcaactgagggtagccactaacaaatttaaagactatacccgccaaacaaactgtaatcgtagaaaaaaataagcagcaattaaagatttttttgtccaaataaaatagtacaagaccgtttgaagattttccacaataaaccaaaacgagcaaaaaacaaaaaagtcttttcagaggactgaaaagacttttttccgaattctaaaccaattcattttagctcctgaaaatatacgacccgatacagaattcagaattcgatacccgttttccttacgaaacagaacgcaaaaaacaacccaatcttattctacaattaatttctctgttgcttcagctccatcctgattgacttttattatgtaaactcctgtttgtaagtcctcaatatttacttctctgccagttgtctgaactgataaaaccattttcccagacatatcaaatatttttacatttttcacagcagttgatttagtttctacatatacctttcccttttgtataagattgggatacactgcaaaaccttcaattttattatcaactactcctaaactacttttttcgactgttaccgtataggtttttgctgtaccatcctgagctaaggagccgtaactacgatagttcccgttggagttaaacagtctggttgaaccgttacactggccgttggcgctgcagggttacccggaacggcattgatggttaaattcgttggcaaggatacacaacctgtagtggtgttggtggtcgttacggcataagtacccggagccagattggcaaaggtagtcgtagactgtgtcactgcaggagtcaccggactagtacctgttacagtatacgtcacattagccgcaggagccggagcagtaactacgatagttcctgttggagtcaaacagtcaggttgaaccgttacactggccgttggcgccgcagggttacccggaacggcattgatggttaaattcgttggcaaggaaacacagcctgtagtggtattggttgtcgttacggcataagtacccggagccaaattggcaaaggtagttgtagactgtgtcactgcaggtctcaccggagcggtacccgttaccgtatacgtcacattggccgcaggagccggagctgtaactacgatagttcctgttggagtcaaacagtcaggttgaaccgttacactggccgttggtgctgcagggtttgcgtttggtgccgaaacaccgctcccagctgcactcacacaaccattagcggctgttgtcgttacggtataagttgctgaatcagtcactgtaatgctagaacctgtttgtccattgctccacaacaatgtacccggagccgttgttgatagtacagaactaccacaattgtttactaccgttactatcggagttgccggtggagttgtatctactgtaacaactaccgtatctgttttagaacagcctgatttcgtagtcgttaacccataagttgtggttaccgatggattcgcgaatggatttgaactggaatagggactactaaaatctaatcccgttgtcggtgaccacgaataagtaactcctggctctgctaccattccaatttgtttccccgcaacatttatcgtacagtttttagtaaaatcggaacctgcatcagcagttggtcctgtaatacttggaattgtaaaaacttccgacgggctcgaagtataatcagccccaataatatataaagctgcggtataagcctgattgtaatttaacccgctgataactcccgctgatgaaattgttacaccgctaacctgagttccactaggatattcataaaatctgtattcgtattcacttgcattattcaggtagtttgttatagtcgctgtaccaggcagagaacaagtacctcctatggctataataggcgtgaacaaatcgatactttcacatccaaacccgtcattatcagaagaggtattggatggaagaacccagctaatatctgttgatcccggaagatctacatctttaagtaaataaacatttccagtatcattattaaaaaacatcatgacacctttagaatcaatccaaactgcaccaaaatcatttccaatggtattcccaaacctatgggaaacattagaatctgtcagcttcaatactctgctctcaagagtttgagcaacttcgtcaataataattaaaaaacactctgttcgtggactagttccttttcctgcaattccataaaattttccgttataatacgtataatcattggccgaataggctcctcccatgttatttgtaagaggtatctgctcaacattaacgctgaaaactccaccgacaaaaggctgattgacattaaatcttgttaggatatttttcgcctcatccctgaaatagatatagtctcctcttgaaaacatattggcataaatatcttgcgtccccattaaattaagactaatctttcctacgtagttaaagttatcagccggatcaaaaaccctaacatcatgtaatggatcagtgccatcaccattaatatacaaatatcctgtgttagaattgtaagccgaagcagctccagaggtaattcccatagtaacggaagtacctaaggcattgaaccgctgtaagggtaaattatactcaaatatatttacggtagttccagtccctcctctggtttgatagatggaattaagcccggcacaagtctgtgcttccagttgataagaaatgcctaatataaaaagtaaaaagacaggcttaagaaaattgaagctttttagagtaaagtttttcatatatcaaatctgtttaaataaaatggtcatttcgaagtttaatttcttttgcactgctcttagattcacatcttaaaaaattaagcaaatgcaattttgtattccaaaattaagaacagaccaatttttttaacattttattcgctacagagtagtatcggtttataaaatgagactgttttgaaatgggtaaaaaaaggacgatcgtgtttatttgccacttttacagatagttacaaaccttttctttaaacattaaataattcacatatgatgcttcacttcaagttcaaagttcttgtataaagaattaatgcatctattttcacaataaatgtgactttcacaggttaaatattgaaacgagtatgtcgtcgcctttcttttaagaaccctatccaaatcggatagggttttttgttttataacgttttttaaatccttgcgcgctttgcggttaaaaaaaaattgcacacggatgaaacggattcgtcaggcgaaaaggcggatcagaacggattttttttgatttgcagaaatgaaaattgcttttgcctttcagggcgatggttgcggctcattttggtttatacatagtgccccgcaccatgctctttgcttttggggctttcagcccttttttcttgcgtgctttgcgtaaaccttcgcggactttgcggttaaaaataatagcacgcggatgatacgggttcgccaggtgaaaacacggattggaacggattttttttgatttgcagaaatgaaaattgcttttgccctttcagggcgatagttgcggttcattttggttcatacgtagtgcctcgcgccatgctctttgcttttcgggctttcagccctttttccttgcatgctttgcgtaaatcttcgcgctctttgcggttaaaaaaaaatgtacacggatgatacggatttggcaggcgaaaacgcggattggaacgggttttttttttaatttgtagagatgaaaattgcttttgccctttcagggcgatatttactgttcattttggttcagatatagtgcctcgcgccatgctttgtgcttttggggctttcagcccttttttcttgcgtgctttgcgtaaaccttcgcgttctttgcggttaaaaaaaataacacacggatgatacgggttcgccaagcgaaaacgcggattggaacggatttttttttgatttgtagagatggaaatcgcttttgccttttcaaggcgaaaatgacattatttttatttatttcatagtgctttgcaccatgctctttgctttttgggccttcagcccttttttctttgcgtaaaccttcgcgctgtttgcggttaaaaaaaataacacacggatgatacggattcgccaggtgaaaacgcggatcaaaacggattttttttgatttgaagaaatgaaaattgcttttgcctttcagggcgatagttgcggctcattttggttcatatgtagtgcttcgcatcatgctctttgcttttcgggctttcagcccttttttcttgcgtaaaccttcgcgttctttgcggttaaaaaaaataacacacggatgatacgggttcgccaagcgaaaacgcggattggaacggatttttttgatttgcagaaatgaaaatgcttttgccctttcaggacgatatttgctgttcattttggttcagatatagtgcctcgcgccatgctttgtgcttttggggctttcagccctttttccctgcatgctttgcgtaaatcttcgcgctctttgcggttaaaaaaatagctcatggatgatttatgcccccttttttttctttaaatattctttttgtcgttgactgcgttagggatgggagcgatatccttttgtgatgaccgtacatttaaaaaatccctgaaacttctatcgcaaaagatttagcggacagcccgacccgtaggggaatgccataataattaactaacacgaaaagatgaatatgcaaccgtataggacatgtgtggttgaacgagtttatgaattgggtatgattaatgtttttgttgtgtctgttttttaaactctggtttgattaatctttgttggctttttgcaagtgatcgggcaggttagaatttgctttgaaatagtcttagtgattgctaggggagaaatatttagcgggaatgacggtagttgttgctcgtattttgtaaggacaagagtctgtttttagtgaagagtgtttgttctgcctgttagtttttttgaggataaatggttgtttgttattaaaatcttggatttttctgtctgatctttggaagggtggtataaaacttttgaattgctcgaatttcattgggttgtaaattcgaatctctgtagtctgcttttgtttttgttaaattgtttcctgatggcaataagttgaattatgaatgataaatgtcttataggtgtaaatgagtatcggtttagtgttttctcagttttttaggttgaatctttattatggttgcttttttttaaagatcgggattggagtggtttttaatttgctgtgtttgtttcgagatggttttagtagttgtttgggatgtaaagctgttagagcaggtgaggttgtcattgtttgtggattaaaatttggcaataaataatgaaatatgttgagaatgatgtaaaaaaagaataatgttcaagggtaatattgtgatagatatgtatgaatgaagaaaaatcctatgattctaaaagaaataagaaggtgtaaagggtgtgttatcagactgttaaggaaaagtttaaaaaaagattaaaaataagtttagaaaaagcttgtgaaagcggataaagtgactacttttgcacccgcaacagcgattagattttttcgcattactaaagtactgcaataaattgcagggttttaaacccgaatctgagaccaataaaaatcaagctgcaatttaaattatttcgtcttcaaaattttaatgaggctctttaaaagtaacttttaaaatggttaccttactgctttacaaaaacagtacttcatgaaaagtttttctttcccgcccctatccaacaaagatgctgttattctgattttgggcaccatgcccggaaccaaatcattggaactgaatcaatattacggtcactatcagaataatttctggaaatttatgtttgttattttgaaagagaatcaatctactgattatgaaacccgaaaagctttgctgcaaaaaaacaacattgcggtgtgggatgtgttacagcattgtgaccggatagggagtttggacagtgcgattaaaaacgaaacccctaatgattttgaaacctttttagaacaacatcccaaaatcacaaccattctttttaacggacaaaaagcagcagcattctttaaaaaatatgtccagctgaaaaaaaactatcacttgattacactaccctcaacaagtccggcaaatgcaggcaaaagctatgaatctaaacttcaggagtggaaaatttctgttgatccatctcataataatacatcgacacctcacacagattaatttttttttaatacatttaagttgtaaaaaacattgattgcgttattttttctttgaataagctattctcttccggagtagccttgttacttaatcggaaaccaaaacgatatcattatgaaaattcaaacttattacaatcatgttcggttttataccccgcatcattttgtttattatccggttttagcactattcttaggttgcagtatttacttcgcctgtacgaccgaaaatacacttatttggtcgtttataagtgtttgttttctatttctgttttttcttgcctatatgttgcgccagcattacgccctgacgcttcagaaccgaatcgtgaggctggaacttcgttatcgttatttgagccttaccggaaaaaggcttgaagaattcgaatacaaactaacagacgatcagatttttgctttgagatttgctcctgacgacgaaatcctaccgcttttggaagatgctcttaaaaataatctcagcggagacgctataaaaaaagccatcgtacactggagagcagattacaacagggtataaaaacaatggaaaggataaactttccctaacctctacttctgcgattaaaccaaacatacactaaaaaaagaatcagccaaacggttacaatcacgccaaaatacatcccaataattgacggatgtaaatagttgggttcgtaaaaaagcttatcaaaagtgataaacttctctattaatgcttttcggtcaaagctgtttcgaatcgtattcaatacttcatcgcgatgttccctaaaataaaaagcatctgcgacaagttctttgggaacaatattactctcaattttatacttcttcaaaagagtatccagcctctgaaaattcaactgcaacgaatcttttttgtatttgtacagcagtttataacgttgtactgcagcatcgtactgttgcttttctgttgcaattcctttcaccggtttaaacaatgatttattttcgagaaaaatacaaatgctatcgtcatattgaggtcgtacctcaacacctctgaataggatctctgtactgtctttaatcgcttttttggctataattctctccgaaagttcttttttatctaaaccaatttcatccaaaaccttgctagttacagtcgaaactttatctaaatcggttgtgagcactttcaaagtatcgatgctgtaatacgtgctctctgtgttgtaatatccatttgatattaaaacactatctactacttccgtgacaggatagggttttggatataagatatgaaccggattaaacaacttttcagaactgtaagatgtataattgtataaaaacggatttaaaacattcagtaaaaccttgtctttattgaaattaacttccggaagttcactccttaatttagcattcagcccaaaactataactgatgaaaaaggaaaaactcagaaaacaaatcagcagtaataccaaaccggttttaagaagattggttaaagaataaggatatcgggagtgatttttaaccaaaaatatcaggaagaaaaataaaaacaaaccgctgatgaaaaaatgggaaatggaaacatcatcataaaatttaaatctgtaaaattcaaaataggaattgatgttggcaatgcctttaaaggtaaaaaaaccatataaaaaataccctaaatgaaggaacagcagcaccaaaaaagactttacaaagaattgctttaattttttttccattttatattttgagaatttactctcaaatataaccaatcttttagtttaaggaattatgaaaaaatgtttatttaatgaatagtactgcggtgttttgttatatttctttgaatcaaattcattattctttgaaaaaaccgcttaacgttgaaaaatcatcgaataaaattctctggtttatgttttaaacagggggttttattgattatatttgtttcactttttttaatgaaaatgattacgaatttttaaacctactatacatgtcaacattacgtttccaagctttacaagaagcttccaacagaaagcctgtacattttgaagaaatagacagaaagtcaaacatttttggttcaaatgtgtttaatgagaaagcgatgaagcagtttttgacttctgatgctttaaaaggagtgagagatgccgttcaacacggaactaagatagacagaaaactggccgattatatcgccatggggatgaaagaatgggcattatcaaaaggtgtaactcattatacacactggtttcagccgcttacaggtacaacagcagaaaagcatgatgctttttttgagacttcttatgacggaagtgatcctgtagagaaattcggaggagcacaattggtacagcaggagcctgatgcatcaagttttccgaatggaggaataagaaatacatttgaggcaagagggtataccgcttgggatccaacttctccggcatttatatatggtacaaccttatgtattccaaccgtatttatcgcctatacaggagaagcgctcgataataagatcccattattaagagcactatccgttatggatgaggctgcgaccgaagtttgtaaatatttcgataaaaatgtaaagaaagttaccgctactttaggatgggaacaggaatactttttaattgataaagcattagctaattcacgtcctgacttaatgatgacaggaagaaccttactggggcatacttctgcaaaaggacaacaattagacgatcattatttcggttctattccaacacgtgctttaacgtatatgagagatttagagcaggaatgtatgttgttggggattccggtaaaaactcgtcacaatgaagtagcgccaaaccaattcgaattggctccgatttttgaagaaaccaatctggctgtagatcacaactctttattaatggatgtgatgcagcgtgtagcggaacgtcatgattttaaagtattgtttcatgaaaaaccttttaaaggggtaaacggttccggaaaacacaataactggtcattggcaacagatacaggagttaatttattgagtccgagtaaaacaccaatgagtaatctacagtttttaactttctttatcaatacaattaaagcggttaatgattacgaaactttattgagagcatctattgcaacagcaagcaatgatcatcgtttgggagctaatgaggcaccaccggcaattatatcggtttttattggagcacaattgtctaaagtattaatagaattggaaagtgtaaccaccgggaaattgtcgcctgaagaaaaaacagacttaaaattaaatgtagtagggaaaatcccggacgttcttttagacaatacagaccgtaaccgaacttctccttttgcttttaccggaaataaatttgagtttagagctgtaggttcaaatgccaattgttctaacgcgatgactactctgaatgctattgtggccaaacaactaagagattttaaaacagaggtggactctttgattgaatctaaagacatgaaaaaagacgatgcaatctttaatgttttgagagaatacatcaagcagtctaaaaaaattctgtttgaaggagatggatatagcgaagcctgggaaaaagaagccgctaaaagagggttaagtaattttaaaacgactccggaagctattaaagctaaggtttcaaaacaagctttggagttatttgatgaattaggaattttaaatcacgtagaagctgaagcacgttacgaaattgaattggaagaatacactaagaaaatccagattgaaggacgagtattaggggatattgccagaaatcacgttattccaacagctatccgctatcaaaatactttaatcgaaaatgtgaaaggattaaaagaaatttttggtaaggagtttgaaactattgcaaaagagcaaatagttttgattaaagaaatttcaggccatattgaaggaattaattctaaagtattggctatgacgagtgaacgaagaacagcaaaccaattgactgatgcacaaaaaatggccgaagcttactgcaataacgtaaaaccttattttgaggacattcgtaatcattgtgataaattagaattattagtagatgatgaaagctggacgctaacgaagtacagagaattgttatttacgaagtaatattttagaatatacccgattaagtcccgtctttattggtatctaaatatgcggctgatgctaataatttatctttaaaattagtgtctggaatacttattatttgtgcattcaaagtattaaaaaggcatagagccagaactacaaagtagagtttcttcataagtggtatttttacacaaaaataattctttaacacaataacacaactttttctgttaaattttaaataaaaaaaatattgaagtaaaaaaaagtcccacattgctgtgggactttctatttagaggaaactaagaattattttttctccgttttttccattttagcttttaatgcagctaatacatcattgttatctcctaaagttgcagctggtgcattagtagtagatgtagatgaagtattttcagttgcagctttcacgtttttctcttcttcttcacggaagatagcagtgtgagaagctactactcttttgaattctttgttgaattcgataactttgaaatcagcagtatcaccttttttcaatttctttccgtcttctttttcaaggtgacgagttggaatgaaagcaacgatatcatctccgaattctacagtagctcctttgtcaacgatttcagaaatctcaccattgtggatagttcctacagcgaaagaatcttcgtattgatcccaaggattagcagtagtttgtttgtgacctaaagataatttacgtccttcaacatctaattctaatactacaacatcaagtttctcaccaacatttacaaactcagatgggtgtttgattttcttagtccaagaaaggtccgaaatgtagattaatccatcaattccttcttctaattctacgaaaataccaaagtttgtaaagtttctaacgatacctgtatgtttagaacctactgggtatttagaagtaatgtcagtccatggatcttgagtcaattgtttgatacctaatgacatcttacgatcgtctctgtctaaagttaagataactgcttcaacaacatctccaactttcacgaagtcctgagcagaacgtaagtgagtagaccatgacatttcagaaacgtgaattaaaccttcaacaccttcagcaacttcgatgaaagcaccgtaatcagcgattacaactactttaccttttactttatcaccaattgttaaattagcatctaaagcatcccatgggtgagcgtttaattgtttcaatcctaattgaattcttgttttctcatcatcgaaatcaaggattacaacgtttaatttttggtctaattcaagaacttcacttgggtggttgattctgctccaagaaaggtcagtaatgtgaattaatccgtcaacaccacctaagtcaatgaacacaccataagaagtaatgtttttaacaacaccttctaatacttgtcctttttgtaattgaccgatgatttcttttttctgtacttcgatatcagcctcgataagtgctttatgagatacaacaacgtttttgaattcgtggttaatttttaccactttgaattccatcattttgtttacatatacatcgtagtctctaattggcttaacgtcaatttgagatccaggtaagaaagcttcaataccaaaaacgtcaacgatcataccacctttagttctgcattttacaaaaccattaacgatttcacctgtttcgtttgcagcaataactctatcccatgatttaatagtacgagcttttctgtgagataatactaattgaccagttttgtcctcacggatgtcgattaatacttctactttgtcacctacttttaagtttgggttgtaacggaattcgtttaaagaaataacaccttccgattttgcgttgatatcaacgataacgtctctatctgtaattctaacaactacaccttctactacttcttcctgatctgtagcgatgaaagtttttgaaactagttcttcgaattctaataagtttttctcatcaactgcatcaattccttcttggaagttatgccagttaaaatttgctaaaaactcttcttgtgattttaattgttcagacatgctgataaaaaatttgtattctgtttctctcgagtttcataaagcagtagaaaatacagaagttgttttacataaatagttgatacctaaaggaaactcttctttgccaaaaggactgcaaaattaatacatttatttttaatagcaaaacaaaagtgtgttagatgataattgataattgataattgataattgataattgataattgataattgataatggttaatggttaattgttaatggttaattgagaattgagaattgataatggttaattgttaattgctaattgtgaattgtttctaaactcttttaaaagtttttcaatttctaaagtagatttacgcgctcttggtccagcagctttaacacctttttcagttaatgattcagcctctgctttaaatgtttcaatttcggcgttgatttttactaatagatcgttcatgcttataattattaaattaagtcgcaaaaatagaagtttgaatgggagttacaacacatttgctgttaaatttatcctcatttttaggtctctgacttaacgataaatttactttttctcttttttgcatttcatttttcacaacaaactaatagtcaatattttattttccacccctgataactcctgccctgtaaggcattccgtagtattttcaataaaatttcattttgtagcttcaaaacacatcaaaaaactagattttcacccctttccgcaattgaaattcttcctatttttacaaaaaaacgtcaaatatgcgccggattcgactcaaaaggcttcaaaaatgaaggtatttgtcgtaccaaactccaactatgaaaaatggtttattcccttattctagcttttacttttgctaaaaaaatctcttacccatcaatcagattctttctacccgggtaacattgcaatcaataaatgcaattagtttttctattttcttgctacaattttctttgtttgaaattgagataatataaccatttttgtctttaatatataacagaaaacagtccttagtgagaattgctttctctatctggcaccatctatgagtaaatccgcctaggggggaatgtacctctataaatgaattcgtaaaactaaatttgtactgacgtgaaaaacgatcaaattttaataattttctaaccaatcgaaaagttactttgcaaattgtatttactattggataatgaaaaagtaaaaaaaggatcaccaaaaacaagtcttttataatccattgaaaaaaatcattgttccctttccaatctgaataaacaaagaccaataaagtaactgctaaaaaaaacattactctttgtttgtacagatctttgaagtacatcttatgcaaattacgtatctctgcaatattcaaatcaaactccaatgaaaaagtagaggtgcccatatgctgttatcagtgttacttattaataaatcatacacttttaaccttcctcttctcttcttaaaaaataatgaagaagtaattaaagtatacagcaaatttaattgtaacattttctctcaagcaccacaataagccataaaactatcgtaataagacaaatatgaaactaatttgtctattcgtttttttttgtataagtcttctatttaattcctttttttaatgcagccagggcaggatctgttgctgctttaatttgattgattaccattctggcaatttctgtggctccttttaatgacaaatgggtatcatcatttttatcgctatcgtaataggcattttcaccggctttaaaatgcaaatgcagcagtttcgatttttcggggccgtaggtttgttctaatatttctgtcaaatattcgagatcaatgaaagggactttaaattcttgcgccaccagtctggttattaaaggataatcaccgtgtgtgggtattaaaactcctttttcattaaaattacgtctcgcgatggagcttaacaatacgggggttgctcccttttggcggctttcttttacaaacttaatcaggttgtatcggtagctggtatgcgggtttgtatatcgggttgaatcttcgattttttcgtcattatggccaaactcgatgaaaacgtaatctccttttttgagttttttataaatcgaatcccatcgtttttcattgataaaacttttggtactgcgtccgtttacggctttattttcaaccacaatattttcggtaaagaaaggctgtaaaacctgtgcccaaccgtgttccggattgcgttctggatcttttttgttggccatcgtagaatcaccaatagtataaagtgttgttttctgagcgaaacaagccattgaaaacaaaccgataattagcagataatatttagtcatttgatttaaaattaatccgtttagtgtacttcgaaaaaataatatttaacacatagaaacatagtttcctaatttaaaaaagaatactacagagaaatatttttctctcacatagctgatgtatttttaaaaattagtacaactttttaaaacctaaaacaaaaaactcagtaccttagtacattaagagtaaagagtaaagagtaaagagtaaagagtaaagagtaaagagtaaagagtaaagagtaaagagtaaagagtaaagagtaaagagtgaagagtgaagagtgaagagtaaagagtaaagagtgtctcatagaaatacattcctctactataacgctctgtgttttattaaaagtgaaacgccttaatttcagttagaaaagctatgtatctatgtgtttaataatcgccacagattaacggattaaaaagattacaaaacttgtgcaatctgcatgaaaaatgattttacacatagagacatagtttcttcaaaggtaaaaaaatctatgtttctatgtgttaaaacaatactccaacaaagagccaacagctaagaaatctgcaagatctgcgtgaaaaacactcaacgcatagaaacatagtttttaaaaggaataaaagaatattaaatcagtttattactggtggcataagcgatggcctcagcaatatttcctacccctagtttggtgaacaactttctcttgtgaaacttaatggtatcagccgatacaaacatactttcagccatgttggcaatggtaaaacccctgatagaatattgcaaaacctccttctcacggctggtcagttctatctttttcagcaccttccaaaagcctccttcaaggtcatagctgaagattttattttccccttttttataaattttaatattccccgactgcaattcagaagaaagcgagataatacaaatcgatttccagattttaccgtcattggtcaggaaaacaggagtcagtttttgattcaccaaaaaagtttttccattgggattttttaagcggaagtcataggaaatggtgtgattcaggcgttcttctacaggaatgttttgataaaagtcaaaacctatggtattgatctttagtaataaatcgagatcttctttgactacatacttaaaataaaaggcatatccgagttcctgaacctcagccggggtgtgatcacacaagaataatggattttcggacacatactcaaacccctttttttcgtaatcaataatataaatactgctgtaagttgttctggcaaatgctttgaccagttctaaataatctcccagtctgcctttttcatcttcagagatcttttgaacggtgttgtttgaggaaaaaaagtcgttttcaattaccatattttaatagttttttaacaggttgtgaatataggaaaaattggagatatgatgttaaaataattttatttctatacgaatttaacttcatttcaataaaaatgatatttggttttttggccgctttttttcttcttaaattcgttatcaaaaactacacttaagggtggtttttgattaaaatactgtgaactagtattttgtgtaataggaagcgtaaattgtggtgatagttttggagaaaacaaatactatgaaactcgccaaaaaccaccacacagaaatgaatcaaaatgacatcttccgtatgtcaaaatttgtagtcacagaaaacttcaatcatcactctaatgaagtttttccaagccactatcaaaaagatattgatgccgtttacaaagaagaaatgaacttccttgaaaactccaaaatattcgcattcaaaaacgaactgggagactttaccggaaccatcagagttctaaaatgggacttcattaccccgcttcccattcaaaaaatgtttggtatcaaccctttcttatgtgcagaaggagatgccatcaatgaaatctggcacattggacgttttgccatcaaaaaaggtgttcgtgatgttaaccttctaaaaaaactattggtttgtgccattgcaccggtttgcaaacacgaagacaatatggcctttgctgaaatcgatgccaaactgcttcgcgtgctaaccctaatgggcatcaaagtaaaaattgtgggcaaatcaatcgaatacctgggatcagaaaccattcctgtatcgatgtcctataatgggcttattgctttctataacgagaacaaacatttggttacaccggaagattttgagctttcgtctgtaaaagataaactacccaataaggtagtatttaaggctaaccaattgaactacactttggtgtagtagaatttgaaaacctgatatatcatcttcaatatatgctcaagctactattgtaacaaatccatcaaatttgcagataaataccgctttaaatgggcctggaatagttatcgttggtggaacattgtcgggagcagcaactgccgcaacattgcgtgcaaatcaagttgccaccttttctaatggtattagtggcgctggtttgcagataccgagcggtgtgtactttactacaggaagtgcccctttcgaattagcaaacaaaaatactgctgtccaaaatagttttaaccctgctggagctacaacattatcagatcccaatttatctttaattgatcctaccgcaacacgtgacttagtatcgtattcttttacaataactttagcaccgaatgtttcgggactactttttagttatcaatttggttcagaggagtttccagattatgtaggttctaattatgatgatgcttttggtttttttgtttcggggcctggtatttctggaattcagaatttcgcaacattgccaaatggtaatgccacatcaataaataagataaattctggtattcctggatttagctcaccggcaacacctgtcgctgcatacgatggttctcaatctgctttgtatatcaataatggtcacattacaactactactggaggtaaatataacctgaatacagcgcctcaaccaggacctttcccagtttttacagaacataatggtttaacaaagtcgataaagaaatccattgctggcttaactcctggaggaacttatacttttaaaattgtaattgctgacgctggtgatgcatcgttggattcgggtgtttttttagatattatagagggtataatttctgccgatctctctgtttctaaaactgtaaataacccaagtccaaatgtgggaagcaatgttgtttttacactcacagcaggcaatactggtcctggtaatgcaccaaataccaaggttacagatttgttaccagctggttacacttttgtgtctgctacaccaagtgttgggacatacgattcctcgacaggggtttgggatattggtttattaaatataggctcttccccaactttgcaaattactgctacggtaaaagctgcaggtccttatttgaatagtgcttctatagcatctccagatattgcagatcctacccctggaaataatacctctagtgttaccccaaccccggttgcgcagtctaatgttggtataaccaaaaccgcaagtagcgctacgcctaatgttggcagtaatgttacttttactttaacagcaactaatgcaggcccaagtgctgcaacaggagtgagtgtaacagatattttaccttctggctatacttttgtaagtgccagcacagcttcaggaacctatacaagtggaactggaatctgggcgattggtactttagccaatggagctaatgctacattatctatcattgccacagtcaatgcctctggaacgtataccaacagtgcgagtataactgccaatgaagcagatcctacccctggaaataatacctctagtgttaccccaaccccggttgcgcagtctaatgttggtataaccaaaaccgcaagtagcgctacgcctaatgttggcagtaatgttacttttactttaacagcaactaatgcaggtccaagcaacgcaacaggagtaagtgtaacggatattttaccttccggttatacttttgtaagcgccagcacagcttcaggaacctatacaagtggaactggaatctgggccattggtactttagccaatggagcgaatgctaccttatctatcattgccacagtcaatgcctcaggaacgtataccaacagtgcgagtataactgccaatgaagcagatcctacccctggaaataatacctctagtgttaccccaaccccggttgcgcagtctaatgttggtataaccaaaaccgcaagtagcgctacgcctaatgttggcagtaatgttacttttactttaacagcaaccaatgcaggtccaagcaacgcaacaggagtaagtgtaacggatattttaccttccggttatacttttgtaagcgccagcacagcttcaggaacctatacaagtggaacattatcatgatctcttcaacatcccgatagcttaatgtaaacctaagcttaaaatatacggcctgcagtataatagattttggataacaatgacctttagtattcatgagtttaagaatttaaaaaggcaaagataaaacttagctttagatgcgacagaacctgaatacttcttctaaaggagcttctttaaaaagcaattctaaaattcggttttttaaaaatccataagacaaatttgtgcttattttatgatctaattttgtgttttgattcttaacctttaattcttcttctaaatcgtttaaaataattaattgcatcttattccaagattatgcttactcatacattagaaaatcgtactcattacattttttgcattataaaagcctattagttggtatttttaataaagaaattaaaaattaggtagaaaactctaaaattctaatcacatgaaaagcaaaaaaaactttaccggcgccatcggtgcgtggctgactaatgagctacatccagcaaacgcgacctacagctcacccaacagcaattttagttctattaagctcaacggtatatacagcacccttgattacctgagcatcggctggtttggagtggatatgagcaaccctagcagtcccaccctgcaaaccagtaacacatatcttgcacaacaggttttagatgcccgtgcacaaaacccggacatcaccatatttgctttactggcctatacccaagaaatcaccaaggatctccaaacgatcatcaacaaccccgtcctgctgaccacttttgctaccaatgttgccaactttctggctaacaatgacctcaatggtttcgacattgattgggaacagcccacgagccaactctctcataagcaatgcggccaatggctcaacgcattgggtaaggctttcggggatacctattatctggccatttcggcgagttctaaccagtccggtaatgtcaacaacctgaatgcggatgctgtgaatgccaatgtggatgtgttcaatttgcaaagttactgggttagcgatcctagcgtatttattgcacacggtatcaatgccgatctattgggattcggtgcttatttagaaagtggtgtcactgcgctttatgcttctcagcaatacgctgctgggattcagtaccagagtaagcaatacccctaccaaactatgatgagttggcggcttgattcttccaactggcctttcgagcaaagtcagcaactattgatgcggccatacctgaccggccaaccggatgtggctgtgttcgacgatggagccatcttgaatgcgcaaactactcctactattatccaaagtatcgttatccgtagcggagatgttgtggatgccatccaatgtaccaatgccagcagcgacggctcgtatgtggtacaactattacaacacggtggcgatggcggcaatgggaataatccgatcaatctcacaaatggcctcaccgctttcagttacgtaacaggctactggtacggacaaaatgtggtagttcaaatcaccatcaacggcacaagttatcccgccaccattaatcccaatgtagttgatacacaaaattttcaggtgactgctcctgcgggtagaactattattgcattcagtggacaaacctgttatgtgaatttggcaggcggaggtttcagttgggtgttatcgcagatcaacggagtattcggttagtgatttttttattccctctggtgctcgtatacaacgagtgcctacataatatttaaaagataattgtagcgtttgtaacgcgggctaataaaaaatggttcttaatacgttttattaagtagtaagtatctaaaaagccacattgcaaacgctttgatttagtttatactagtaaaagggggttctgtcgcatctgtcagaatcaaatataacactttaagtaatttaaaagttaggccgccaatctacagaatgatataatggtaagaacttgggttgccggatttttagtataactcaatcgtatgttacctaagtgatctttgtattgataaatatatttataagaacttcctgaaggctctacataaccctcggcagttcggggcttttatattctttatcgattttctttgcgttcacgagcgggacgctcgcgccagcgggggaaaagccactccgttatggaatggcttattagcactattagatattgtacatctagtattttatttcacagatgcattaatttgttttgcctcttcgttaaatgattctttaagagcttcaaaaaaatccttatcattaggatattttatttttaaattatcaatttctttattaatttgttctggacccaaaatttttgactttacaagaaacaaattgtaatatgcttcttggtcgaatgacttctgattgtctataaaattttgaatttctgctattgctttatcaaaatatatttttttatcttcattttgcaatttagattcgcaatctaacgctttaaaataattgtattgcattctcttttcatatggttttgagaaatccttttctgcaagggaatctataaattcatatgctttattatattcctttaaaaatgaaagagcagatattttcaactcaattgatgccattctggtctctgggcaatccagagattttttaacatctttcaacgcatcggacagtaaagcaggatttttctctgtatagaatttattaaatttattttttgcacttatgtaatttgttttacaaacatctttatttcctgtttgtccgttacaactacataaaaatgttatcattacaatacagttaaaaaatattcttagactaaagtttgaataattcattttgtaatttatttttataattatttttaaatctgttaatgttttattggagagtaaggagtatattgaaaattataggttttcgcaataattccaaatcgccctgtcacaggtacagcaccactaccatcatctttaacgttttgccatgctcctgaaacatttgctcctggaaaaactttaggacctttttctgctgatatttcagttgctggtataaaaagacttcctgacacggaacttgttcctgattgctgtattagagattggtttccgtctggtccttgaagacctgtaccataatctttacctccaaaagttgtagtagccattccagtaactacaacattatccgttcctgtagcggtaccttcaacagcaattcctatatcaataccattgaatgttttggagagttgcccattagaatcaaaacttgttgtaacattagcattaacattgatattcgattctgctgtaaccgtcgttacgtgtgaagcccccatagttactcctccttgctgctcataatctgacgcaacccatccaacttttgttgttgaaggtgatggatatgtacctacccaacctaaatcttttacaatggaactatcttctttacctacatagctatatccacttggagtttctgattctttagtcacattattgttccatgtatattctcctgtcgcaatatttttaatccaatctaaaggtcccattccatcagggtctacaaaatgcataggattatcaaaacaatagttgtaaggagaccatcttctcatctgttccgctaacgggtcaatattcatccaacgaccaattgcagggtcataatttcttgctccatagtcgtaaaagttaagccccagctcgtcctgcaattctttcgaattatacttatacttattactagtagcaacataatcattataccccttgtgtttcaatccaaaaggataataattatttttcagagtctgatttgaaatcgtatcttttaggattggttccggattatatggttcctcaggtgtttgtggttttggatcagatgccattaacttcaaacggaaagatcgacagaaaagcattaccggatcctactgttacagaaggacgtgtgtatgtggcaccagagacaaaaacagaggaagaattggttgttatttggcaagatctgctaaatgtagaacaggttggggttacggatgatttctttgaattgggaggtcattctttactggctgttcgtttattatcagctattaaaacgacacttaatgtggcaattaatatcactgatatattcgaccatactaatattgcagctttagcagcttttatagaaagtcaggacaatacagctgtacttcctttggtaaccaaacaagacttacctgccgatattccattgtcatatgctcaggagcgtttatggtttattgataaattaaaaggaagtgagcattaccatgtaccagtattattaaaccttaaaggagatcttaaaatagactttctttctcaggcgctaaaaacaattgtagaacgccatgaggcattgcgaacagtgtttgtagagaaagaaggtgtggcttatcaggaactgcagtcttctgatcgttgggagatgagtgttttgacttctgtaacggattacaaatcattcctggcaaatgaagtaaacaaatcatttgatttatcaaaagattatatgcttcgtgctacagtaataaaagtatcagatgcagaacatattttagtactggtgcgtcatcatattgctaccgatggatggtcttcttctgttattgttaatgagtttaaagaactttatgcttcgtatgcgtcaggaagagaagccgatttaccggtgcttagttttcaatatacagattattcggtttggcagcgttctcaggtatccggcgcttatttagcagagaaactagagtattgggagtcaaaattaggaggcgtagctccttcagcactacctactgattatctaagacctgccgttccaagcggccacggtgactttgttagttttaggctagacagccagcgtagtgaagctttaaaggcttatgcaaaagaagaaggagtaaccctatttatgttattgttaagcatttataaagtattgttatatcgttacagcggacagtcagatatctgtatcggaactaccgttgccaatcgtccgcagcaggaattagaatctatgatcgggttcttcgtgaatactttggctcttcgaagcgatttatctggtaacccatcgtttaatgagttgctgaaatcggtaaaacaaaccactttagaagcttatgatcatattgccgttccgttcgaaaaagtagtagatcgtgtggagaaggcaagagataagagcagaaattctatcttccaggtattgtttgttttaaacaacaatccggatgctaaggtggccgattttagtgacattactattgaaccgatggcagtggactataatatttcgaaatttgatttaaccatttttgccgaagacggccctgagggaatcttattttcattcaactattctacagatcttttcagctcttctacggtatcaggattaagatcacattacgagaacttattaacagctgtcttagaaaacggaacctcatcaataggtgatttgacgatgttaagcacagaagaagagcaggcattggtagtagactgtaatacccctgattatttattatcaggagaaggaactgtattgtgattacataggtaaaaaatatgtgtaccagtacaaagatcatttgggtaacatacgattgagttatgctaaaaatcctgcaacccaagttcttaccattattgacgagaataattattatccttttgggttgaaacataaggggtataatgattatgtagctacgagtaataagtataagtacaacggaaaagaacttcaggacgatgatatcggaggccttaaacttaatatgtatgactatggagctagaaattatgaccctgcgcttggtagatggatgaatattgacccattggccgaaactagtcgaagatttagtccttatacttatgggcttaataatccggtattttttattgatcctgatggaaggcaagcaacgtataattgggacgaacacaaaaagggtaataaaggagtctatactgatggtggtaaaaccgtatcgtatgagcaagctattgcaggttatagtgatgataatgggtatgatgaaaaagggaatcaagtaaataataaaggtggggatacaaccgattatttatatggtaaagatggaaagatcatatcttcaacttccgttaagttaaaaagtatttcacaaggagaatttggaagtaatggggggaaattaagaggttatggttttaagggttggaagatggctactggaaattcacaatcgatggaacttacctctccttttttctcatggggttgggcttttaaaggtataggggcagtttggagtgcaacatttgggacaacagcaagaacggcagaagcatcgggttctgtatattcagttgcattcgaaacatcattatcaagtgacttatttccgggtggaagttattatggacactttaaagcggctaacaccgctctgaatacagctattgagacggatgcttcgttagcatcctccatgtatgagttagggattactgttccgaaatcatcagctggaagtgttttaggtaagtccccaacgaattgggtgtggcatcatgctatagagccaggagttatgcaattagtgccaaaagtacaacatacaccgggatcagtcttttggaataccttgcacccaggcggagtgggtggaatgtcaatatggaacaaattataaataaatatagatatgaaattaattgaactggtaaaacatttaaaaagtgtaaaggaatctgagaagtttacaagtacacaattgtcagatatcgaatatgatcttatcgatatgtatatgattgaaaaagttgaccttgattcagatattcttttttttgatgctgaaaaaatacctaataaacttattttagaagttgaaggggtaacttatgagaatctttttccattgaatatggcacaagatatgatcgaagaatttgttgggactaatgcaagtgcaagtgatcttgaaattgctgaatttataataaattatagaaaaaaagatgcctaagaaaaatcgacaaagcatataaaaagaaagcctcgctaccagcgaggttttttgcgttttaaaacttgtgtaaacatgcttgttttttctgcataaatgccaacgataaacttcaattaaaacctaaaatgttcctggcatttatgcagaaaaaacaagcatagcgattgcggcgattgagggtaatgttacagattaggtgttttggtaatgttacagattaggtgtttttgcaaaataacgatgtaacgaactgaaagagaatataaaattttaattcttgattacgcaacaattaaagtaattctttttccgaaagttgttttaaatataacgatgcataatagccttcctgatttattaattgattatgagagccttgttgaatgatcttcccgtcttccaaaatgattattttatcggcattttttgcagatgataccctatggcttacaattattgtagttttatctttacaaattttaaataaattgctaagaatcgtttcctctgtttctgtgtccactgccgacaaacaatcgtcgaaaagtaaaatagccggatttttaataattgcgcgcgcaatagagacccgctgcttttggccgcctgagagagtgattcctctttctcctaaaacagtatcgtattgtttgttaaaagcgataatattatcatgaactaccgcatttttggccgcttcgattacttcttcgtctgtagcgttctgattgccgaattttatattgtttttaatagtgtccgagaataaaaaagcgtcttgaggtacaattccaacattatttcgcaaatcatacagattcagaccactgatttcgttctgatcaatagtgattttcccctcggttacatcatataaacgggagattagtgataatattgtagactttcctgaaccggtttttcctaaaatagccaatgtctctccttttttgacagtaaaagttacatttttaagagcctcgatcttggtgtcttcgtaggtatagtttacattttcaaaagaaatggtaccctcaatattggaatgattctcgttattattttttatttcgggctcgatttttaaaaattcatttaaacgtttctgagaagcttcggcttcctgtaccattgatgaaacccatcctaatgaagctaccggccaggttaacatattcacatataaaataaactcggcaatcgttccaatattcggaatcgttccgttaatgtacatgacacctccaaagtaaatgactacaaggttactgattccgattaaagcaatcatcaaaggaccaaataaagactgtactttggccaaatccaagctcttttttttgctttcgtcagccagagcgaccatgttgttttgatgctgattttccagtgagttggcttttataacacgaataccggaaaagatttcctgtgtgaagctggaaactttagataaatattgctgaaaagtggtacttcttttattgatttctgagcttagtttgaaaatgcaataagaaagaattggtaaaggtaaaattgtatatagtgttaataatggtgagacattgtacatatatattatgacaatggcaaaacgaatgaaagtgttgatcgtgtacattaccgccggtcccacatacatacgaacttttgagacgtcttcgctaatgcggttcattaaatctccggtgcggttttgtttgtaaaagttttgtgagagtttttcatattgtttgaaaacttcattttttaaatcaaactcgatatgacgcgacattacgatcaaagtttggcgcattaagaaggttagaaaacccgctacaatggtagtggctatgattaacagtacgttatggattaatccttcacggtacgtatcaatgacgatttgcgaagattgatcggcttttggcagtttgtcaaacttttcgatagcgtttaacgacttgctaatgagctttggagtaaatagagagaatatttgtgcgattatggtgattaaaatacctaaagagaaactatatacataaaatacagggggtcaaaataaaaaattaataaaaataaagcacttacccctattttttacatggttattacttgattttatacatttataaaaaatttaaaactaaataactatgcgaaaaattattttaagtgtgattcttatcacgattttagtattcacctttttatccaactttatactatccgataatccaattccggcagaagctgtaaagtttgacacaggagatacagcctggatgatcgtagccactgcatttgttttgcttatgacaccgggattaggatttttctacggaggaatggtaggtaagaaaaacgttattagtaccatgctgcaaagttttatggcaatggtaattgttactatcttatgggttattgtcgctttcggattagcatttggcccttctattcgcggaatcattggagacccaacttccaatttattctttcagaatgtaggtaccagcactgcctggagtcttgccccaaccataccttttatgttattcgcattgtttcaggcaaaattcgccattattacacctgcactaatcactggtgcatttgcagaacgtgtgcgtttttgggcttatttgttattcatggttttattcatcctaatcatatattctcctttagcacatatgacatggcatcctgacggagtattctttaaaatgggagtattagatttcgcgggaggaacagtagtgcacatgagtgccggatgggccgctttagcaggagcaatattcttaggaaaaagaaaaattcaaaaagtaaatccagccagaattacttatgttttacttggaacaggtttgttatggtttggatggtttggtttcaatgcaggttccgcattaggagctaacggattagctgttcaggccttaggaacaacaactgttgctgccgcagctgctgctatggcttgggttttcctggataagatcttaggacacaaattatccgctctgggcgcttgcataggagcggtcgtaggactggttgccattactcctgccgcaggttttgtaagcatctctcatgctattttcatcggagcattctctgccatcgttagtaatctggtagtaagcaaattccctaaaggaaaaatcgatgatgcgttagacgttttcgcctgtcatggtgttggtggtatggtaggaatgctgttaaccggtgtttttgcctcgaaagcaatcaaccctgccgttggagacaatcaaggtctaatttttggaactccaacactatttatcaatcaattaactgctttggtaatcgtttctatctttgcttttgtaggttcttacgctttattctttgtcgtaaacaaaattaccccgctaagagttaccgaagaaaaagaagaattaggattggatatttctcaacacggggaattcttataaaaacaaatttccgcctttgcccataaaaaatccctctaagtctgaccttagagggatttttgttttgaattaacttcaccttagtttattgtagactttagactttagattttagattgtagattgtagattgtagattgtagattgtagattgtagattgtagattttgatttttactctttactctttactctttactctttactctttactctttactctttactctttactctttactcttcactcttcactcttcactcttcactcttcactcttcactcttcactcttcactcttcactcttctttgaaaaaccattcctggattggggtcagcgcaacagcaccactcacttcactttgatcgctaacctgggtggtcagctccattaaccctgccagctctcccagtaccggtgtgcttaacagatgctctactttaagtctgtaaccctgttgttttaatcgggctaccacctgaattgacttgatggaatctccaccaagattgtaaaaactatccttgataccgatgccttcttttttcaataccgctgaccataccgaaaccaaaaccttttcctgttctgttaccggtgctgcatattcaacaccactcgataatcccatagcttcagggttcggtaatgcttttttatctattttaccattggccgttaatgggatggcttcgagttgaacaaagtacgccggaagcatatattccggcaacgactgttttaaataagctcttaaatcgcttgtgttttgctcgacattagaaacgatatacgccacgagttctttctctcccgactcgttctctctggctacaactactccttgatttacagcttcatgttttactaaagcatgctctatctctccaagttctattcggtaccccctaatctttacctgatcgtcttttctccctatgaactcaatgttcccatcaggtagccaacgacccaaatcgcctgttttgtacagacgctctcccgctttaaaaggatttgctacaaacttctccttggttaacgcttcctggtttaaataaccttgagcaaccgattgacctgaaatcacaatttcacccgtaacattgaccgcaaccaatttttgatgctcgtctaaaatatagacaatcgtgtttccaagcggtctgcctataatattggcttcaaatgagcttacatctttatttacgattgcatctatcgtaatttcagtaggcccataatggttatttaatttaacgtctggcaggagttcttttatgcttttaactaaattcgcattaagtgactctcctcccatagctatcgtccttaagaacttattcaattccttagctgtctcttgtgttaactctgatacgaattgagcaaaatacgtgggtgttccttgcaaaatcgtgactttgcgatctattatcgttctaattgctgcctgtgcattattaacaatattccctgccgaagcaacagttgttcctcctgcgattaacaccagaaatatttctaatagagaaacatcaaaaacataattagttagacaataactaatgctttcattatctattgataatagggttttctcttcaattaatttattcgtcaagttttgatgactcaccattactccttttggattccctgtcgaacctgaggtgtagatcacataagccaaatgatcgcttttagccatgcgagtctctacatctttagcataacgttcctggttttctttgaacctgcttaactcttgctcatccagacaaaccttacactgtgtatcttctttaatatagtctattctttcctgagggtattgcggatcaataggaacataagctcctcctgattttaacacacccagtatcgacacaatcatccactcgcttcgctccaattgtatccctatcagatcatccggctggggtacaccttatataattacttctggggatttagattgctctttcgacgaattagagcgattaatcttagaaagctataatcagagtaaacaaattaaaaattagtacagcactatatgagtcgtcctaaaataggttgataagttttacaatattaattaaaaccagtaaagttctctttgctggttttttgatatacaaaattaggtgttttcattttcaagcttaaatgtggtcttttttgattataacattctacagattctttaattaatttacttaactctactgctgatttacatttatagattaaaaattcattcttnnnnnnnnnnctttaaaatcccattgattctttctgctaaagcattctgataacagtcatatccatcggtcattgatggctcaatattattcttttttaattcattttgataaacttgggaacaatactgaagccctctgtctgaatgatgtattagtgcaagtttattttttctattcttaaccgccatcttcaaggctttaacaacattctccgcactcatatcgtcacttaaatgatatccgacaatcttcctgctaaaaacgtctgtaaccaatgagagataatgagttctttcataagatttcacgtaagttatatcgctaacaaaaacctgttcaggcctatatctatcaatatctttgagaagattaggatatttatgaagccagtgtttagaaaaagtcgttttaatataactttttgcaggctttataagcaactgttctccttttagatacttgaaaaatgcatctcttccgattttgatcccattttcagcaaaacaatcctccaataaaaaataaagttttcttatgcttaatctaggcattattcttctttgtttttcaaccagttccctaactttgagcgattgttctttacgtattaacaagcgtgattcatgctgataaattgattgtcggcttatcccaaataatctacaggcataggacatgcttattcctttttcctgctggatgcttctgatggtttgggagaaaacttttttctgatttgagttccatattgactgtcagaaatatcaatcatagtattaagaaccatgtttttcagtttttcatctgccagttctttttctaatcttttgataatctgtgccggagtttcttttgattttgacataaaaagaagattaggtttactccagtctaagttaccaaattttcgcaaccaaaccaaaactgtctagtcctgaaatagcggtacacaaaaattacctttgcaagccctcgatcaattgagtacatttacaacgcagcgggtcaaaaactgaagaaaattgtaaaagagaccagcggtacaactcatactgattatttgggaagatttcagtacaggtataacgaagaccaaagtattccggttgatccgggcgacactgatcctcctatttttactccggatccagtaaaagatccaccggcagaagccaatcgttttggcgccttcgcagcgcaatcggtaagtgaagctgctccatcgcgaccaacgttggagtttttccctacggcagaggggtattatgattacataggtaaaaaatatgtattttttaacattatctttaataacagttttaactttgttttaatttgttacattgttacaattttagctttgcttgaaaaagaggtctttattgttaaatttaaattgcgaattgaaatatgataaaaaaataaactggagattaacaaaaagaatcttaagcgaagctctattttttcaaaaggataatctatttgaaatttagctgtaatatctgacaaaagggatgttttacgggatgtttttttatccttgaaacttagccaagaccttatctttgagtctttagaaaatggataattgttatggaacagaaaatacatcagggaagaaacgtaaaacttttttagagaaatgcttaacataaagtagaaagcattagtgtatgatctgggagaagaatggaatcagaagaaaatctctatgctggagcagaaagaagtgattgaagatagtttgttgaaacaaatttctgcactactaaagattcctgttgaagcttttcagaattttgatgaagaacaggcgataaatgttatagcaaatacttattcattccaagattttaaagataatgctgtcgcttctggatttagctatcaaccctctttcaatgctattgataaaattgttcaattatatgacgaaaaaattgcgttatacgagcgtatgttgaaagagaaagatgaaatgatgtcaaggtttgaaaaatttatcagcaaataatcatttataaacctatattgagtacacaagcatagttttaaagacttgctctgaaagagccatagcgatataatagtgcgaagcactattaatggttaaatgtttttttttttttttttctaagccctgaaagggtgaaagccgaatctcaaacaaaaacgcatttataattatggcctaagcatgctcttgcctcttcagggcaatgtgctccattgatttagtcatagtgcgttgcactatgtttgtgctttagggcttacagcccaactaatcaaaaaggtttgcaagaaatccaaatgttcttcttgcaacgaatttattaaaaaaagcctcactaaaatatttagcaaggctttcgacaattttatattgaagtttcttctagaaagctacattccatcttggcaattttgcattttcatctaagaaattttgcaaaacctgcccttctactgtagttggaattccttttgaatctgcattgaaagtttcgaaccaaactacttcaagagcagtaatattttctaatttcatttgtgccggccaagagtattttcttcctgttttggcaaattgatgcccgtttacaattttatcgtacaatccgccgtttttgcttttcaaagtaccatcattctgaacagttccggtagatcctaccatgatcaattcttttgtatttccttcaactgcataaactacaaaaacacctgcacctccttcaggagcgttacaaacttgttctaaactgtcttcaattgtaaaagtaaagctgctgtttactttaaatttttctaattctttgtacatatttttatttttaagtttctaagatgctgagatacttaggtttctaactgtaaataaagcacaattaacggttacagctggtaataaatccagagcctatggagctgtcaatccagacttaacagtgtcttatagcggttttgtaaacgaagatacggcagggagtcttaccacagcgccaagtgccgcaacaagtgctgtcgcatcaagttcggcaggcagttatgatattacagtaagtggaggaagttcagataaatacgactttatttatgctgctggtacactgatcgttggcaaagtgccattgaccgttacggccgataataaatcaaaaatctatggagccgctaatccggtcttaacgctgtcttatagcggttttgtaaacggagatacggcagggagttttaccacagtgccaagtgccacaacaagtgctgtagcatcaagtccggcgggcagttatggtattgcagtaagcggaggaacttcgggcaactacgacttaacttatgctgctggtacactgatcattggtaaagcgccattgaccgttagagccgataataaatcaaaagtttatggagctgctaatccggtcttaacgctgtcttatagcggttttgtaaacggagatacagtagggagtcttaccacagcgccaagtgctacaacaagtgctgtagcgtcaagttcgacgggaacttatcctatcacaataagcggaggaacttcggggaactacgactttacttatgttaatggtacactgaccattggcaaaacgctattgaccgtaactcaaattactgttggtactaaagtttatccaaatccggttaaaactattaattacctgatggcatgtggcgagaacaacgtaaatgtagcattgaacaatgcaatcaatgcaacctttacgcctgcagctaattttacgatcaatacacctaaacctggaatttatacgcaaaatgtaacgattacttctgaagacggaagtactaatgctacttatgctataactgtagaaaaaccatttgatttcgatgatattgtacaccaaaaattcaataatgtacttatcgtaaacaacaaccctcaaacgaatggaggttacgagtttgtttcataccaatggtttaaaaatggacaattaattggtacaggccaatacttttcagcaggagacgatctggcgaataaattagatcttactgccgactatagtgtaaaaatgactactaaagatggtaaagtgctgcaaacatgtccttctaaaatgaagacacagaaatcacttgaggttaaattgtatccaaatccggttgaggcaggaaaaatgcttactgtagacgctgatttgccagaaggtgatttagaaaacatgcaaataagtctttactctgttacaggtaaactacttacaacagtgaaatcgtctactgctcagacacaaatacaattacctccaagtactgagagtaatatggttcttgtagttattgagtcaggtaatatcaaaaagtcattcaaagtacttgtaaaataatcaaaatcatgccagtaccacttcaaaatggtactggctaagtatctctcttgcttctgcctgttttacccgatcttaaatctttcactgtaatgttaagatctgtattgatagcagcgtctgttgatttctgagtggtatataaatttgaaaaatcctttttgatcgcatttctcattactttaacctgacctggggtgaacataaacgtgcagttgctataatccataatattctctatcaaccttctgtgcccaccacattgaacaggagcaatacaattttcataaaatctcgtttttggttcttcggcaggtggagtatcactaattttatcatttttaccggtacaaccaccttcaaaagtatgtataaggctaaaataatgtcccaactcgtgtgcagctgttgtcttttttatcgatagttcattaacatcatctttatagtcataagccaaaacaataaaagctagtaatagtttttcattgccatcacgcccgacaacagttactcctgaaaaaaccgacttttctgagattaattcaggtacatatttgatgactattttttctttactatcattacttacaagatctcttatattaattccatcagcgtttaatttttgtatttcaggtattgaatttatcttatcttgattatagatcttctttgatcctttacggatggtaatatcaatatctttgaacacgattctggcattagccattttggcacccgccgccactgctgcaggcggtaaagtcttacccgttttatcggtataggctttattagcccaattaaattgctgtcttaccatgtcttcataataagaggctgtattattatcttccggggcttccagaatttctacatttacttttttgatgataaaataaggatactctttttctattattctcttcaagttgtcattcctttccaccgcgggaacccgtacgtccatcaaagtagcatctttcatcgcaattttcaccactacaggctggttttctaactgtattagtttatcctcgtctatttccaaagaacaggaagaacttacaaggctgaaagccctaagccagttccaggcccagcctccacaattcactgtaactgtattcgatgctttagcacccagtgtttttatatcatcagaagaaatcttaccaatctgctggccataatcaaagtattcgtaattcatttcttttgttgttttagaaaacacatttggggaactttgagtgatttccacattatagatcggtctggttacaaatgtcttctcatcatttgtcaatagctgcaaccctcctgctctcttactgtcgtaagcatgcacctcgattttgatataacctccgggtttatctatggttcccttaataccgcttaggtagttattgcgacggttgtaaagtcctttgtaatatacggtcagtaaatcagactcactgctattgtctgttttcggatttgcagaccaaaataccttctctccaactacctttatattattatccggatagctgacaacaccactgccttctgatttttgggcatacatattttatggagctagtggtcatacatattatttaagaacagtcaactccggtaattctgccacattgacgacacctgacaatgtagctactttaagtaatttgagtattagcgacggaactctgaatccagtttttaactcagctacgatgagttacaaagccacggtgccttacaagactagcgacataacggtatcgcccgtaatgagtagtgataaggcgaccattaaagtaaatgatattgcgttggcaagtggaaggccttcgcaagcgattgctctaaaagttggagataataacattaccgtagcagtaaccgctcaggatggtactcagaaaacatatacggtaaatgtaaccagacttgctttgactcagcctattgttcaggctactaatcttacttttaccaagacgacagcgacgagcactatgttgaactggaccaatggagatggagaaggaagaattgtatttatgcgtgaaggtgcaacttcgagtaatcctgtaccggataatacttattttaaagacaatcaaacctttggtaagggtgatcagattggtacaacaggctggtatgccattgttaagactagtgaaggtaatgcgttaacgattaatggtttgagtccagtaaagacctatcaggcaatggtgatggagtttaacggttccccaagtaatcctttctttttaaccacaaccagcaccgctaatccggcaacagtcactacattaagtaatgtcgctactttaagcaatttgggtattagttcaggagctttggatccggttttctcttcagaaactacagattatactgtgaaagtgcctaacaaagtcagtagcgtaacagtaacgccagttacgaccgatagtcatgcaacggtaaaagtaaatggggtagcggtgaccaacggaaatccttcgcaagtgattgataatctggaagtaaataatgtggatgctaaggctaatcgtattgcgatcgaagttacggctcaggatggtacggtaaaaacctacaccataaaagtgctcaggcttttagcgccgccaacgattcaggccactaatgttacttttaccaataccacagcaaatacaacgagagtgaactgtacaaatgggaacggaatgatgagagctgtatttatgcgcctaagtacaggcgatggcaccacacctgtaccagataatgtattttttgaagacgatgaaacctttggtaagggcgatcagatcggtacaacaggctggtatctcatttattatctggtaggtaataatggtgtagaagttattggtttaatgcccggaacaacttatcaggtcatgattatggagataaatattagtaatggttatctatcctatttaaccacgaccagcaccggtaatccggcaacagttactacaccactgagtaatgtcgctactttgagtaatgtaagcctgagcgccggggcacttactacggttttctccccggaaactacagtttatacggctaaagttctcatcaattattaaaattattttttcgctactattttctttcgcatacttcaaagctctggtaaaaatccctaaattttctttatagagaagttcattattactcaaatctggtcgaataccaaatataaaatcagaaaaacttgtttctgcgtgaaattgagtaaaaaatgtctttgcttttattttttctgcaacttccttcgccgttctagtcttaccggttcccggagatccttgaagaacaacatatttcctatcactaaggaggctttttatttcttcaacttcattttttttatcttcttcaaaaaaaggttttaaagcttctgaaattgctttacgttgatccttattagatggccaatttctaagtttcgcataaccagcaacaaatgcagttattattttctttccttcttcactttcaggattttcaacaatttggcaagcaggtaaaacttttgtgtaagtctttatcgtgttttttatttgctctagatcttcactattagcaatcgtttttggtaaaggtgtttctatatctgcaaaatctgatttacaataccctttttcattaatgagttttgaaaaaagtcttcttactccaggatagttagcaagctcataatcatttttgaaaccgcttgacccaatacctaaacaaaccaaccaaggtttattgtcaatacttggaaaaatagttaatgaaaaatcatggaatggtcctccagattcttcttccggatgaataaaaccaaaaaaagctcctctatctttaagcacgtctggcttagtattatttctctcaacatatgatttattaaactccttatcattatttgctccaaattcttctgccttcagcctaatgaattctaatacatttgtaatacttatattttctttgctcatatcttttattagagtattattttacaattatcctcaactttatttattacaatcatattaatatcattcatcaaataaatcttttatatttacttctaaagcgttcgctaatcgctcaacaacttcaatagagacatttctttcacctttttcaatcgtcggtaaataagttcgatcgatctctgctaaattggccagcttttcttgagataatcctttgagttttctaagctccttaattttgagtccgaatttttgtttaatatccatgttaacaaaaattgcaaaatgtagactctaaaacaacggagtatagtcgggtttttgcttatctttgaaataaaattcctatgttaagttttaataagaaggttcgacatttagaaagttatttgttgcaagcacatgaaaattatgcagatagttttaaagaggacattgttatgttcatagatgatttttcagatcaaaatgagcttttgtcttttctaaataacattgattcttttgaagaaattgagaattgggtagataaattatgttcaaggatcgttttaaagtttgattctgaaggagaagaaatcaacgattttatatatgatgctagaagtgtcttacagatggagggtcatggaagagaggagatcatcgatggagtagatatcagcagaacggttggttggtttacaacggtttatccgtttgtactggatgtatcgggttctggtaatgaagcagcacatttagtggcagtaaaagaagctttacgccgtttgcctaataaaggaattggttatggtattctgacccacttaagtcaggaaagacttgagagtacacttgtaccggagattacctttaattatttgggcgattttggtgtaaatgtatccaatgaggaagattccttgtttgaatatgcctcagagcatatgggatcagatacttctaaagagaataaaatgcatgcaattctggatgtatcggggatgctggtaaagggggaactgggtatatcgatccgttattcaggtttgaggtatgatgcggcaacgattaaaaacctggcgggatcttacaagaaacatctggagtttttaatcgcagcattggctaaaagcaaagagcagcatctgaccccatcggatttaactttcaaaggattgagcggggcagagctcttagagcttaacgcagataatacccttgaggatgtctatgagttatcccctcttcaggaaggcatctactaccactggctggcagaagattccggttcgctttattttgagcagacctcctacagggttcgtgccaaagtgttggatatagaaaaattaaaaggagcttatgataatttaacagccagacatgctgttttgcgcagtagttttagtactgaatatgcagggagatctttgcagattgtaaggaaagaagtagcgagtaattttacttatcagaaacttgacggttcggcagaccaagatttgcaagtagcgctgatcaagcaacaggacagggaaagaggttttgatttgggcagtggttctcagatgcgtttgcaggttgttgatctgtcgcaaggggagtatgagtttatctggagtcatcatcatatcctgatggacggttggtgtgtaagtgtgcttatcaatgactttaatgagttgttgagtgccgcaataaaaggcagtacagctgatctgccaccggtaatgccttattccaattatatcaattggttggaaaacatagacagagagcattcactgggttactgggagggtagccttaaaggttatgcagcaccggcagagattccttttaagacaagagctgtagacactacttatgtcgaatacagtgaacgccttgacatagggggagctgtgtttaagcaagtagacacgctttgtaccgctttaggcattacccacaatacttttatgcaaggtgtttgggggtatttattgtcacgttacaacaacacgagtgatgtggtgtttggtgctgtggtatcaggtcgtccggccgatttagcgggtgttgaagatatgatcggactgtttatcaatactattccggtcagccgcctatacaaatctctccgactactcctatagcttgtaattcttctttttcgtttaaaatataaatctgcgtgttgccaataggcttaccaattggaatactatcagatactatcttttctctgtggtccagcttaaatatcgttccacaaatacttgcttcagttggaccatatgcattgtaatacgtgccatatttaagataatcaatagccttttcgtactgagctgattctcccgctgtgataagtgtctttaatcctgtcaattcactaatttctattctgttcagaattgacggagaaagtgtagcaatatcaattgcattagacctgataaaggatactagtaaatccggatccttacggtgtgattcggtagcaataaataagcgagcacccgaaagtaaaatgatcaatgtttctgaaatagaagcatcaaatgaaaatgatgcaaactgaagtgccctgcttccactatttacattaaaatcagttatttgcgacaaaatagtattaacaatagcctgatgctctaccatcactcctttgggattacccgtagaacctgaggtgtagatcacataggcaagatgatccgatgcatctcgtttcgatactgtttctgaactataattctctgaatcaaactctacatcaatggcaaaaacgtctccttcataataatcaatatcgtagatgaagcctgcctcggttatcagcaatgctatagcactgtcttttacaatatattcctttctggaagatgggtactccggatcgatcggaacataagctcctcctgattttaatacgcccagtatcgccacaatcatccactcacttcgctccaattgtatccctatcagatcatccggctggatgctgtaattttccattaggtaatgcgccaactgattggatcgctcattaagttccctgtaggtcagttctgtatcctcaaagactatggctatgttatccggtgtcttttctacttgctcttcaaacaagtctacaattgtcttgtctttcggatatgctactgttgtatcattgaaggtgaacaactgtttgtgtttctcttcttccgatacataatccaatgctgttaaagactgatccccgttttgtgcaaacgccttgattacggtagcaatatcatttaccagctgctttaatgatcttgtatcataacgattgctattgtatctgatatttaggtgtaatgaaacgggggaaggggtaactataatattaaaatcatagttgctttgatcactgacttcccttgattctattgaaagcccctcttcttcccgactattgaatacctatttaatttttattacggaatataattacagttaatgtaaaaaattagataatttattatcattgtagaatcgaaatcgttttaattataaattatggtaatcgataacaatatgtaaaacgttataaaaaaaaatgtatttttgtcagagataaatatgaaaaaccatttttaatgagcgaaaagataaccatttacgatattgccgaaaaattaaatatcaccgctgctaccgtttcgcgggcattaaacaataatccgaaaataaaagagagcacgcgcgagttggttattaaaactgcggcttcaatgaactataagcaaaataagctggcgctagcattaaaaagcggccgaagtaataatattggcgttatagttccgcgtatcgacagcaactttttcgcttcggttatccgaggaatagaagaagaacttcacccacatggttatcaggtaattatttgccagacacacgaaaatccgaaaagagaaaacgaaaacttatatactttaatagatgcccaagttgacggtatcatcatgtcggttaccgatgtaacgggagaaaatgatggtgcttttcaatatgttttgcaaaaaaatgttccacttatctttttcgacagaagcaaacatattgacggagtgagttctgtaaccataaatgactttagaggcggttaccaaacgactaaacatttaattgatgaaggctgtagaaatattgctcacttatcaggagatcagtcgcttgaaatctttaaaaaccgatttttaggatacaaacaggctttattagaccatggaataacatttgacgaaaaatatgtcattcctgtaaaaagtaccgttgaccacggaaagcaggccatagagcttttacttcagttggaaacacctcctgatgctatattttcatcaagtgattttgctgctttaggtgctattcaggaactaaaagaaagaaatgtcagtattcctaaagaattttgcgtagcgggtttcagtaatgagcctttcacgaaatttatggaattatcgataacttcggtggatcagtctccgcttgaaatgggtaaaatgtctgctcgtgtttttctggaacaggtcgacaaaacggagacgattaaaatagaaaaaaaggtagttcttgctccggaattacatattcgtaaatcgtcgtcaagaactagcttttaaattttttttttaccattaagatattaagacaagttaagttttgtaattaacccgttaggcataaccactatactgcttaatgaaccttaatatcttaatggttaaaagcctcggttatcagcaatgctatagcactgtcttttacaatatattcctttctggaagatgggtactccggatcgataggaacataagctcctccagattttaatacccccagtatcgccacaatcatccactcacttcgctccaattgtatccctatcaaatcatccggctgaatgttgtaattatccattaggtaatgcgccaactgattggatcgctcattaagctccctgtaagtcagttttgtattctcaaagactatggctatatgatccggtgtctttgcaacctgttcttcaaacaagtctacaattgtcttgtccttcggatatgctactgctgtatcattgaaggtgaacaactgtttatctttctcttcttccgatacataatccaatgctgttaaagactgatccgcgttttgtacaaacgccttgattacggtatcaatatgatttaccagctgcttaaatgatcttgtatcataacgattgctattgtatctgatatttaggtgtaatgaaacgggggaaggagtaactaatatactaaaatcatagttgctttgatcactgacttcccttgattctattgaaagcccctcttcttcccgactattgaataccccttcgttttccagttcctttactgcatagttttcaaatatcatgacatgatccatcagatccatgcccggttcactctgagactgaacctccgacaggttcatataatgatgtgatgtaccttgtatcgattgctcttgcagcatttttaacaggtcagcagccgtagtatcaacatcatactttactctgaccggaatagtattgataaacagtccgatcatatcttcaacacccgctaaatcggccggacgacctgataccactgccccaaacaccacatcattcgtgttgttatagcgtgacaatagatacccccatacgccttgcataaaagtgctgtgggtaatgcctaaagcggtacaaagtatgtctacttgcttaaacacagctccccctatttcaaggcgttcactgtattcgatataagtagtatctacagctcttgtcttaaaaggaatctctgccggtactgcataacctttaaggtaaccctcccagtaaccaagtgaatgctctctgtctatgtttttcaaccaattgatataattggaataaggcattaccggtggcaaatcagctgtactgccttttattgcggcactcaacagttcattaaagtcattgataagcacacttacacaccaaccgtaagagagcaggagggttgcagctattgacaaatgatgagaagacatttgtaaccagaccgatctataatgtggaaatcactcaaagttccccaaatgtattttctaaaacaacaaaagaggtgaattacgaatactgggatcgtggcattcagattggtaagatctcttccgatgatataaaaacactgggtgccaaatcatcgagtgcagttacagtgaattgtggaggctgggcctggacctggcttagggccttcagccttgtaaattcttcctgttctttggaaatagatcaggataaactgatacagttggtaaaccagcctgtagtggtaaaaattacgatgaaagatgctactttgatggacgtacgagttcctgcagtggcgtcgaatgaaaacctaatatcaataataaagatagaaaaaccttattacattatcaagaaggtaaaagtagaagttctggaagctccggaagacaataatacggctctttattacgaagagatggtaagagaacaatttaattgggctaataaagtctataacgataaaacagctaaggttttaccgcctgcagcagtggcggcgggtgccgaaatggccaatgcaagaatcgtgttcaaagatattgatatcagcattcgtaaggcatcaaagaaggcttataacgcagataagatacagaaagaaggaagagatggtgaaattagcgcgaaagagtttaataaacgggaggtattcatcaaatatgtacctaaaataatcaataatatagatgatgatatggcagcatatactattagatgggaagatgtaaaaagtaacttattggcattttctctcatgcttttggactataatacctctgatgatcctccgcatattcaaagaagaagtgcgcctgcccacgagttggggcattatttttcgctgaaacatacttttgagggcggttgtacgaaagttaatgacaagattagtgatacccctcctgctgaattaataacatacccgctgacctttaaaaattgtattgctcctgttcaatgtggtggtaacagaaggttaattgaaaatattatggattacggtaactgccggtttatgttcactccgggtcaagttagagtaatgagagctacaattagaaatgattaccctgatttatataccattgagaaatcaacagatgctgctatcaatacagatcttaacattacagtgaaagatttaagatcgggtaaaacaggcagaagcaagagagaacataatatggtactataatgctaataaataatgatattgtatataactcaccatcttcgattacactcacattaaaagtcatacatctatcccctaaatcaagcaaggtgtggtcatttaatttatttaatgtgtaatcatgttcaaactctgcagcaattctcttcctaaagaccttactctcttcattattaaaatcatttattatttgaagtaatctcttatactcctcggaaataaaatacatgtctttttctgtataggcacatatatttcgcggatagagtaaataaattaaattttttaaaaccttttcaatcatactaatcgatttaaatagttaattacagtttcctgaagtccatgtatttgttttataattagtcgcgggaagtttttcagttgaattaaaatttaccctacctccactaacgtaaagaggataattgtgcactaatctctctctaaaatatcgatcaagtatcaaatctgacacgtctgttcctccatatttatctattacgtcctgcattgattgttgaagtgctcgagcagaaacatttgccgcaattccaggtgtcatatctgtattacctacctgtatatttgttggtgtaccaaaatatattgcttgcggataactaagaacatgcaatatttcaattccttttggactcaatcctataactctaaaattaatatttttgaccatcgctacttgccaattagcccctttttttgatgtaaagttaaaactttcacaactaggcggaataactttagtcaccgttgactctgtagaactactacttcccccacctcccggagacttcacataccctttcggactattaccctttgatcctgcatttaaactgcctccataagctcctcctccatactcctgcttattctcggatttttctctgcggatgattacttcatctaactcaaaaggatcagatttagatgtcgatttattgaggcgttctgattcctccggagagattactctaagtcccgttagccctgctgtcgtattggagttttcaaattttgccccatttacaaatcctctttctaaatcccaggcaatgatgtatccattaaagttaactaaatctcctgaagtttttattttttctaaagattctgataaagggagtatttcatatagtgtggccgaaaaatcttttttattttctaaaaaacacaaacgtacttccggagacacagaactcaccataagagaagaatacacctattcgccacaagaccgtttactaacccatacccatcaaatcaacggaggaactgttgaagttttggcgaacaatacttatgatgatctgggacaactgagcgttaaaaatgtggggaacaacgcaggaactccgttacagaaagtacactacagttacaacatcagaggctggcttaccggaatcaacaatgtagaggacctgcagcaggacacagatcctaaagatctgtttgcttttaaaattaattatgacaaacagccgggcaactcgcagattcaggccttgtacaacggaaatatctcagagaccacctggacaacagatacggatcttagcaagcgttcctatggctatcagtacgacaagctgaaccgtctgaccagtgccatttacagtaaacccaatgacgctataccggtttcaggagcgtataacgaaagtttgagttacgacaaaaacggaaatatcaagtctttgcagcgttatggagacagtgatgcaccttctatagtttttcaaaccgatgatttaacttacggttatttagatcaaaactcgaaccagctcactaaagtaaccgacggccccgtcggaaatgacaacaaaggttttaaagacggcaataaaacaggggatgatttcacgtatgatgtcaatgggaatatgattgcagacaaaaacaaaaacatcaccgaaatacaatacaatcatctgaatttacctaagaaaattacatttggaacaaatggcacgattgagtatatttacaacgcagcggggcaaaaactgaagaaaattgtaaaagaggtcagcggtacaactcatactgattatctgggaggatttcagtacaggtatagcgaggaccaaagtattccggttgatcttgttgagccaggcggtggagagccagatcctcctgcaccggatgatccgggaaatccgaaagacccaatcgatgggttcgacccggttcctaaagatccaccggtagaagccaatcgttttagtggcttcacagcacaatcggcaagtcaggctgtaccatcgcgaccaaccttagagtttttccctacggcagaggggtattacgattacataggtaaaaaatatgtgtaccaatacaaagatcatttgggaaatacggcaacaggtataacctgttttgcaaattttgatttcatgatatataatttaattgttaacgatctactcttttacaggttttcgatcttttccctgacactgcagtatattttcatgatagaattctattttatgcttttattctgataggaattggtgagtccttcgtttaatttgtaatggactaaatgtttgccaataaacccataaaaattatcaccttgtacaaaaaaattcttgagtttttctttcttgatatggtagatgtagaaactccccttataagacttagtattaagattatagatatcaataatactggcttccttccacatttcagcaggttcgtatttccccggcaatgctgaattgacaaacaataattttttacaaacggcacttgttttattgacaagtaaaggaggcgctcctagttttcgttcctttcggcttgtaacctcaacaactttgatctgggctttactgatagtatcaattgtttttcctctgtactccagattaagcaactcactggctacaataaactcattacgatatagataagtatataccaatttcccaaggggtttgtcgtaatgaagaactccgtctacatcgaaaattccatcgatctgtttttgcaatagctttggattcaaatgcgttttggattcattgccaaagtacagagatccaagtatactttcaccctctgtattgtcattggaacgaaacgccaaggtgagcgaatccataagttcatagtgagaaaaagtggtagttccgttccattttacataggctttccaatccttaatctcacctttgtaaattacagggacggacccatctatgagataaaaatctggtggtgaaatacgaacttgtacagattgaaactgaaaatcgattcggttaggatgaattttaaattgatttcttttttgcagggttgtatcaagtactgagactaaaagtggggccgtatgattacccaaatatattttatcttttgtgactcctgcaaaataataggaattaaatttcatatcaatttcatgcacttttgtaacatttccgggaaaacgacgaacaaaattattccggtggtggatgatgctttccgataacataaatagcagggcaacagattatgtacctacaagtaataagtataagtacaacggaaaagaacttcaagatgagctggaacttaatatgtatgactatggagctagaaattatgaccctgcgcttggtagatggatgaatatcgaccctctggcagaacaaatgagaaggtttagtccttataattatgcgtttaataatcctgtttattttatcgaccccgatggaatggctccacgagcaggacaatcaggaatatattacgattgggatacgggacaatatacaaataaggatacaggtgaaatatcaaatcaggcagatgcaattgcttatcataccaattctattaatggaaaaccaccagcctttttgaatggttttcataagacatactcaaaacgtactgtagcggagcaaagtttggtaagaacagcatacgcattaatggataatgtaacggatgatgcactaagattttttggacatggatataatggacatttgacctacagaggaaccaaaaaggatggtactagaatatttgcagatggtcttgacaattttttaaccaaatcatcggtaggtgaaagatgggttgaaataaaaagagatggaggaacttttatttcttatgcctgtagaaatggagcagaaggaggtattctggaaaaggcttctggtattgaagaattatcgaatgtaatttttgttggaccaactaggaatgtttcaccttccaacgataatgattctggtatgttttttagtggttcaaacaagcatgaaaaaggagtgtggaatatatatagaggtggtgaaaaagtaggtagtcgaccatggaattggcaacctgtagaaattgacccagtaactttaaaagatattgcagaacctaagtaagaaaaatttaatttatagaatcatgaaaagaaaattgtttttaagcattgctcttagtctaataattttaataatagcattaaaatactatactgattatgttactaatttagcagttagagattatgaaaaaaaatatgttgctgaatttaatgacacacacctagctgaagcagaaagtgaggacgatttaaatccaaaatttaaagaaagattaatagacaagtttgataaaaacttttacgatagtatagtaaaggttgatacgatgctcaatggacctgttttaattggggttacattggtattggctgcggttaccggctgtccgtttaaggtatcgtttgctgttacgtttccaattgtagtggccgttgttgtacccggtgtttgaactgggtagctgttgtcaacgttggctacgattgggtttttaacttcaacagttgcagtagcacttgcacagtttacaggggttgctccttcttcacagatttcataagtgatttggtaagttcctgttacagtgtttggatctaaggtcaatactccgttggcgtcaatgctcaatggacctgttttgattggggttacattggtattggctacggttaccggctggccgtttaaggtatcgttgattgttacgtttccaattgtagttgccgttgctgtacctggtgtttgaactgggtagctgttgtcaacgttggctacgattgggtttttaacttcaacagtagcagtagcagtagcacagttggcaggggttgctccttcttcacagatttcataagtgatttggtaggttcctgttacagtgtttggatctaaggtcaatactccgttggcgtcaatgctcaatggacctgttttgattggggttacattggtattggctgcggttactggctgtccgtttagagtatcgtttgttgttacgtttccaactgtagtggccgttgttgtacccggtgtttgaactgggtagctgttgtcaacgttggctacgattgggtttttaacttcaacagttgcagtagcacttgcacagttggcaggggttgctccttcttcacagatttcgtatgtgatttggtaggttcctgttacagtgtttggatctaaagtcaatactccgttggcgtcaatgctcaatggacctgttttgattggagttacattggtattggctgcggttaccggctgtccgtttaaggtatcgtttgctgttacgtttccaattgtagtagccgttgttgtacccggtgtttgaactgggtagctgttgtcaacgttggctacgattgggtttttaatttgctgtaccatcctgagctaaaacttctattgtaataacagtagtacccgctccagaggccaaatctattttttgcgaaggatttccgctggccactgctgtcccattgacttttatggtcgcatggctatcggtcgtaactggtattagcgttatactgctagctccgttaggcactttagtcgtataagctgtagtttccggggagaaaaccgtagtaagtgccccggcgcttagactcacattactcaaagtagcaacattactcagtgtggtaactgttgccggattaccggtgctggttgtggttaaataggatggataatttccattatctagaaactccataaccatgacctgataagttgttccgggcgccaaaccttcgatttggaacccagaaactactgagtcataaatgcctaaataccagcctgttgtaccgatctgatctcccaagccaaaaatagtgcttccactgaaataaaaattatccggtacaggtgtagtgccatcgcctgtacctgcacgtattaaaagcatcctttgttttccatttccattgatacaatgtacagtagtagtagttgctgtggtcttggtaaaagtaagattagtggcctgaatcgttggcggtgctaaaagcctgagtacttttatggtgtaggtttttacagtaccatcctgagccgtgacttcgatcgcaatacgattagccttagcctccacattatttacttccagattatcaatcgtctgagaaggatttccactgctcaccgctaccccatttacttttatagtcgcatgggtatcagtagtgaccggcgtaatcgtgatactgctagcggcattagatactctggccgtataagctgtagtttcggaggagaaaaatggagtaagaactccggtactcaggcttacattactcaatgttgcgacattactcagtgtagtgactgtttccggattagcggtgctggttgtggttaaaaagaaaggattacttggggaaccgttaaactccatcaccattgcctgaacccaagttcttactattattgacgagaataattattatccttttggattgaaacacaaggggtataatgattatgttgctactagtaataagtataagtacaatggaaaagagttgcaagacgagctgggacttaacatgtacgactatggagcacgtaattatgaccctgcaattggtcgttggatgaatgttgacctaatggcagaaaaagcagtctcaataactccctatagatatgcgtttaataatccattaacttttgttgaccctaatggtaattacgaggttgatggacattattggactgtttatctagcggctttgttagcaggaaaatcaaatgctggggagttagcttattatgctcaaattccagacgaaataatggacagaggtggagatatagtaaaagctacaaatacatggacgctcttggattggcaggtagatgtgcatgcgttaactggtggttatagagatggtgaaagaagaaattctgagttaggttattttaatggtaaaacggcaagacaacaaggatatgcattacatagatttggagatagttttgctcactcgaaagataatggaagaatgtattcaacgggaataggacatttatttgaaggacatacaccagataaaatagcagaacgtcctgaattgtataaagaatacgcttcatcacttacttcaatgttaggtggaaatttagaggatatgtttacatttaattatgttgccgataacaaaggaacgacagaacaaaatagtgcaatacttgaaacagaagttaggatacaagaaggagtaaaaacattcagtgttgttggtaatcaagtaggaactataaatagttatatgaaatctagagatgcgtatacaaatactaaaagtaaatacatggctacatcagcgacaggagatgtgtatcgtcctgatgggaatggaggatttactaaaaccacagaaacaagaacctacgtaatatttaattagatgatatttaactttaaattctttgtgaatagatatgacggaaattaaaaacaaacagtcaacctttcctaaatggatggggccattattagaagcattgcgtcaattagggggctcaggcaggcctaaagaagttacaaatactattgcaaaaaatttaaatatttcggacaaaactttagaagaaactaccaagactggaattcctagattttacaatcaagtagcatgggcaaggcagtatttagtttgggaaggtttccttgatgcatcgagtaaaggtatttggactttaacaccaaaaggtaatgaaacttatttaacagaaaaacaaggccgtgaaattttcttgaaatgggttgaaataaatcaaaaagcaagaaaagcaaaatcaaagaacgaaatactaaaagaacaagaggaagatgagccggaaaatattgagcatactcttaaaccaaatttgctggaagttttgcaagggctatcacctaaaggatttgaaaatatttgcaagcgtttattacgtgagcatggttttgaaaatgtagaggttactggtggctcacatgatggtggaattgatggatacggtaccttggagttaaacccttttgtaagcattaaagtattgttccaatgcaaaagatataaaggaactgtttcacgcgctcaagttggagattttagaaatgcaatgataggtcgtgccgaaaagggtataatattgacaactggtactttttccgaagatgcaaagcgcgaagcatcacgagatggagcaccaccaattgaattaattgatgcatctaaattaattgatttatttgagaaagttcaattaggcttaattccaaaagttgtttttgaagttgacttgaaattctttgagccatatttagataaggaaaaaataaactcatagtctctacattataataagatacaaataatttttaatctaaattcatttttaaattggtgcctccaaaattaaagaaatactgggtgtgttaaaatcgggaggagcttatgttcctattgatccgcaataccctgaggaaagaatagactatataaaagaagatactcagtgcaaggtttgtctggatgagcaagagttaaacaagttcaaagaaaaccaggaacgttatgctaaagacttagagactcgcacggctaaaagcgatcatttggcttatgtgatctatacttcaggttcgacaggaaatccgaaaggagtcatgattgagcataagaatgcatattcttttattcaatggagtcatgatgaatttaaaaactctgattttgacaccgttttattcaccacctcactgaatttcgatttatcggtttttgagatctttcatccgctgacaagaggtaaggagttgaaggttcttaaagatggcttatcgatccctgggaatttaaattcagggaaaaaacttctgattaatacggttccaagtgttgtgggggcattgcttcagcaagggatgagttttgagtctgtttcggtattaaatatggccggagagccgattccttctaattataagaaagagttaaaaggaaaagtaaaagagatacgaaacttgtacggaccatctgaagacacaacttacacgacagttttcagagtagataaagatgatcttgatctgattggtaaaccaatttctaatacagagctctacattttaaactgcaaagaggaattacagccgataggagtagtcggagagatttgcataagtggaaacggtttggccagaggttatttaaaccaggaagggttaaccaaagagaagtttatagcaaatccttttaaagcaggagaacgtctgtacaaaacaggcgatttgggtcgttggctacccgatggcaacatcgagttcataggatttatatagtgtccacatgatgataatgttattattattaagtaataaaaagtatttttcattttttaattatatggttgttttctttcaacgactccttgttccttacgaatttgagagtcgactaccctaacttttatttcactttcacttaatgtcccctttgttccatcgtcagggtcaatttttgtttcatttggagttgtatttcgagttccagtagcattttctttagcatgagctaattcatgcccaagtccaataaaggctggtcttccttttgttccatctgcattaacgatgctttcaccttttccatttgcattataacttacagttgaatctgttccttgtcctggagagccatctttattacgaacactatcaaaaccattgtctgccttagtgccattatccccccaagactgttcaattgtagtagttttaggtgattctatcaaactagatattaaatctgttccaacagatagtgtcttatctgaattactacctcctttttgttcaatagtaactttaccatcttccgacatagttaacttatcattcgtgagtttttgtaaatcatttaacgcagtctgcttataagtcgccgaaccccaaattatgatgtcatttggtcccattccatctgggtcagtaaacctcataggattattaaatgcataattatatggcgaccatcttctcatttgttccgcaagggggtcaatattcatccaacgaccaattgcagggtcataattacgtgctccatagtcgtacatgttaagccccaagcctccaatatcatcgtcttgcaactcttttccattgtacttatacttattattagtaggtacataatcattatatttggaaacagatctttcgcaagacaaattacaaggtgctgcatggttgtcgtcagctcgtgccgtgaggtgtcaggttaagtcctataacgagcgcaacccctgttgttagttgccagcgagtcaagtcgggaactctaacaagactgccagtgcaaactgtgaggaaggtggggatgacgtcaaatcatcacggcccttacgccttgggctacacacgtgctacaatggccggtacagagagcagccactgggtgaccaggagcgaatctataaaaccggtcacagttcggatcggagtctgcaactcgactccgtgaagctggaatcgctagtaatcggatatcagccatgatccggtgaatacgttcccgggccttgtacacaccgcccgtcaagccatggaagctgggggtgcctgaagtcggtgaccgcaaggagctgcctagggtaaaactggtaactagggctaagtcgtaacaaggtagccgtaccggaaggtgcggctggaacacctcctttctagagccttaatgttagcctagtgcacgttaaggaaaaaagatgattatttatgggtctctgaattggagattgtattactcttgctgttaatttaaaaaaatgaaaagaattaagtaaaaacagagtctcgtagctcagctggttagagtactacactgataatgtaggggtcggcagttcgagtctgcccgggactactttttaaaacaattgacaattgataattaacaattggtaattaataattaaaaagactgtaagcttaatttaaaaggaaattttagaggttgagtgaccgttttaagtactgttaactgagaacgaatgaaataagaagagggactttcagtccctcgtaaaacaaacctctgcactttcagtgcagagtggtttagtttatgccttctcaagaaacgggagactcctaatgctaagctctgtcaagaaaattattaatctttgacgagctgtttacagctgtttctcgtttcttgggaagacatcttttttaagcgtaactttcttatgaaaccatcagccttagccccgataggagcggtatcctttttcttgcccctttagcaaggaaaagataaagcggatagcgggattagctcccgaaaattaccttcccttaatacttaaatcagataaaaactttaccgtttcctgatcggaatcggcagagaaacctgcgacgtaaaccccttttttacctgagattgatttaattccgtatacaactgcctcatcgccggggtctgaattcccttcgtatcgatacacatgaacaatttcaaatttttcaggattcttttttatcaggtctgagtttaagttaaaatcaaacgtaaatcctttttcattcaattgatctaaagcttttgaaacagttgcgtagtgatacattctagtcatgataattgaattttaaaattatgggttttaaagataaccaatttaaaattaaattgttatgaaaatggagcgaaaatctaaaatttaaaatcattattcagaaccagtttgaaatttattcttgaggtttattcttagaggatttttgagtgaaataaggcaaatttttatagaatagcagcgctattgagggagcttaatgagcgatccaatcagttggcgcattatctaagagaacgaggcgtacaagaagagactttggtgcccatctgtatggatcggggagtggagatgctgattggtattttagggatcctgaaagcgggtggtgcttatgtgcctattgatccggcttatcctcaggaacgtataggttatatgcttgctgatacagctgccttactggtagtgagcacttttgagagccaggccgttttacctgaagattacaccggacttttggtagttgtagatagggattggtctttgattaatgaacatcctacaacgcctcttgatgcagtgctaagctcagcgagtctggcctatgttatttatacctccggttcaacaggaaaaccaaagggagtactgattcagcacaacaatttggttcgtctgttctttaacgatgcttccttgtatgattttagtgaaaaggatacctggacgttgtttcattctttttgttttgacttttcagtgtgggagatatttggagctcttttttatggaggtcgtttggtgattatacccaaaattattgcccaggatgtggcagccttttcagagttattggcagaacagcaagttacggtactcaaccagactccttctgcattttatgcccttttgggatatgttagtggtaaagaaatggcgttatcattacgttacgttatttttggaggagaagcccttaacccggcaaagatcaagtcatggaaagaagagtttccggcggttctgtcgcatctgtcagaatcaaatataacactttaagtaatttaaaagttaggccgccaatctacagaatgatttaaacatagttatccctggttcaatcatctgattctttctcagcatatggacaacttcaattccgcccaatgttcgtcttgccgactcaaaacttttaaagcctaacccattttgtatcctccattttataaatcgatggtcctgttcgacaatattgttgagatatttacactgccggattttaatctttgagaatgaacgtttgttatagactttgatagctgcagtattagaaccgcttttatcaatgtttattactcttggccggcaattattactaattgctttaattagaaaagactgagcactcattctttgtctttttctggtcaaaagaaagtcaaccgtattacctaatttatctaccgctcgatataaataacaccatataccttttactttgatataggtctcatccaatctccagctcgtccccactctaccttttctcttcttcatctctgcctcaagcaaaggtgcaaacttataaacccaacgctgaatcgtggcatgatccacaatgactcctctaatcttcattagttcttcaacatcacggtaactaagtgtaaatcttagcttgaaatatactgcctgaagaattatgtattttggataacaatgacctttagtattcatcttttgattgaaaaaccattcctggattggggtcagcacaacagcaccactcacttcactttgatcgctaacctgggtggtcagctccatcaaccctgccagatcttccaataccggtgtgcttaacaactgctctactttaagtctgtaaccctgttgctttaatcgggctactacctgaattgacttgatggaatctcccccaagattgtaaaaactatccttgataccaatgccttcttttttcaataccgctgaccataccaaaaccaaaaccttttcctgttctgttcccggtgctacatattcaacaccactcgataatcccgcaccctcaggattcggtaatgcttttctgtctatcttaccattggccgttaatgggatcgcttcgagttgaacaaagtacgccggaagcatatactccggcagcgactgttttaaataagctcgtaaatcacttgcgttctgctcgacattagaaacgatatacgctacaagttctttctctgctgactcgttctctctggctacaacaactgcctgagttacagcttcatgtttgactaaagcatgctctatctctccaagttctatcctgtgtcctcttatttttacctgatcgtcttttcgacctatgaactcaatgttgccatcgggtagccaacgacccaaatcgcctgttttgtacaaacgctctcctgctctaaaaggatttgttataaacttatagaacacatcagaaagattgattacaagaaaagatcttttgtcaaagagataacgctcgatatggctaattccatgaagctaatctctaagaaatgttttcctaaagccatacaggttacagatcggttccatgttcaaaaattagcactcgaagcagtacaagagattagaatcaaacatcgctgggaagctatggactttgagaatcaatcgatactacaagccaaattagaaaacaaaacatacattccccagcttttacctaacggagattctgttaaacagttattagccagaagcaggtatctactttataaatctcgcgaaaaatggactcggagccaggaagaaagagcacaaatggtatttgaactatatcctgacattaaaacagcttacaatttaaaccaacagcttcgaggaatttacaataactacaatgacaaacatattgccatgaccaaactggcacattggtatagaaatgtagaagaatcaggttttaaaaactttaatattctactcaataccataactattaattatcagtcaatcttaaactattttgataatagaagcacaaatgcttcggcagaatctttcaatgctaaaataaaagcttttagaagtcaatttagaggagtgagcaatatagattttttcttgttcagattatctaatctttttgcttaatccccaacttttgaacctgatccctaaactacttttttcgactgttaccgtataggtttttgctgtaccatcctgagctaaaacttctattgtaataacaatagtactcgctccagaggccaaatctattttttgggaaggatctccgctggccactactgtcccattgacttttatggtcgcatggctatcagtcgtaactggtgttaacgttatactgctagctccgttaggcactttagccgtataaactgtagtttccggggagaaaacggtactcaacgccccggcactcagactcacattacttaaagtagcgacattactcagtgtagtgactgttgcccgattaccagtgctggttgtggttaaataggatggataactactactcgtatttaactccataatcatgacctgataagttgttccgggcattagacccttgacatccagaccaacattgcctgccatataataaatgagataccagcctgttgtaccgatctgacctccctgaccaaaaacaatgttttccctaagaaatacattatccggtacaggtgtagggccgtcatctgtacctagacgcataaatacagctctcatcgctccgttcccttttgtaaagttcactgtcgttgcggttcccgttgtattggtaaaagtaagattagtggcctgaatcgttggcggcgcagaaagcctgagcacttttatggtgtaggtttttacgaaccctatccaaatcggatagggttttttgttttataacgttttttaaatctttgcgtgctttgcgtaaatcgtcgtgctctttgcggttaaaaaaaataacacacggatgaaacggattcgccaggcgaaaacgcggattgaaacggattttttattggattcaaattgcttttgccctttcagggcgatagttgcggctcattttggttcatacatggtgctttgcaccatgctctttgcttttcgggctttcagccctttttcctcgcgtgctttgcgtaaaccttcgcgctctttgcggttaaaaaaatagcacatggatgaaacggattcggcaggcgaaaacgcggatcagaacggttttttttattggctgtagatgacttttgccctttcagggcgatatttgctgtttattttggttcatacatagtgctttgcaccatgctctttgcttttcgggctttcagcccttttttcttgcgtgctttgcgtaaaccttcgcgctctttgcggttaaaaaaatagcacatggatgaaacggattcgccacgcgaaaacacggatcaaaacggatttttttatgtattaattgttaagggccaggttgttccttttgagattaggcttttgctcttttagagcaatatttggcataatacttttaaagattaataagggcctatcagatcatccggctgaatgttgtaattatccattaggtaatgcgccaactgattggatcgctcattaagctctctgtaagtcagttctgtattctcaaagactatggcgatgttatccggtgtcttttctacttgctcttcaattaaatctacaattgtcttgtccttcggataagctgctgttgtatcattaaaagtaaaaagcagtttgtgtttctcttcttccgatacataatctatttgtgctattttctcttcaggggtttccaacagtgcatttaacaactgcttgtaatgccctatcagtccttcaaccatctccttctcgtacacatccgagttgaatattaagttcaaagacaggcaatcgcccacctcctgaaaagtaatctctatatcaaattttgcagtgctatacccctgatcaactacctgatttaacgcttcttctaatatttcaactccggcaattctttcgctattagttttaacggtaagcatgacgtcaaataccgcacttctgcttgtatctctttgaagatttaaatcttccaccaatcgatcaaaaggatacatctggtggttatagctctttaaagtatgctcttttacagactggtaaaaaccgtcaaaactttcctgaggattaaccctgtttcttaaagccagatatattaagagcgtgtttattgattctggagataggtttctgggaagtatattagtttttgttctctcctatatataaggtaaagttttatatctcgattccgacagtttagatagtaggagcggccatgtctggctgagcgaagtcgaggtctttggaatttggaatttgaaaaatttgaaatttagttttaaggatcaggagctatttcctgctatccgctccaatcttttgtgccgaaccccggcacaaaaggatttccactactatcagggctaggggagcagctttcaaaagaacttttgagataaaataaaagaaaaaccgtccaaaaaaataaaacttagcgcctttgtgtctttgcgagattaaaaagaagtcaaaatgtagccttgagttccttgcgaaacaaactcaaagagaagaattcttggcttctttgcggtaaaatcagctcaaaccattcaaaactttaaaagtatcaaaaaacttcagtctgtaaaaaacaccaagtcagtcacttatgaaaaagattgaaaatagtttgaaaaagctattgtttaactgaataaagtgactacttttgcacccgcaacagcgataaacgttcaccgaaatactgacaagcaaacgaattaagatgaaagatcatcataagtattgttcgccaaaacttcaacagttccaccattgatttgatgggtatgggtgagtaaacggtcctgaggcgaataggtgaattcttctcttatggtgagttctgtatctcctgaggtacgcttgtgtttggtaatgttatagagcgacttcccggtaaaatctaaactgctgttggtattggtataacctcccaagtgattttgagtccgggttctcaccgcacgggatctggtatcgtaaaaagtggtagtggcctctcccaatgcagctgaggcagtagtcagagctcttacccagcttccggttaccaaacctttgacattgtctaaaacggtctgtccttcaattgtagtaggccggctttctgcattgggaaaagcataattatcgtaataagtaaccgttaaaagcttaaaattagtcggagcaatgtcattactgtaatataccgaaatagcatctatggttcctgaggtctttttcgtttcaaatataacattggctgtattttgggcgtcctgcagtgcttttctggtcaccgcattggaaggctgactgctccaacccgtataaacaggtctgccaaaagcatcgtatttggtaatgagccagccttcgaactaaaccactctgcactgaaagtgcagaggtttgttttacgagggactgaaagtccctcttcttatttcattcaagaatgaaatttgaattatcatccccttcttttcttctgtgatgttctagataatcatttaccatttcatctgtaatatttcctgtactccagacaccatagccacttgcccaaaaatgctgaccccaatagcgagcttggagttctggaaattccatttgaagctttcttgatgttcttccttttaaacttttcaaaatagtgctgacattctgcttgggcgcatattcaatgtgcatgtgtacatgatctgaactcacaactcctttcaaaatctcaataccttcggcttcacatatttgtatcaaaagttcacggcaacgtttttgaacatctcctttcaaaactttaaatctatacttagtaacccaaacaacatgacatgttaatcggcttactgtatgcgaaccttttcttatatctgtactcataatctaaagatatagattttttcgcattactaaagtactgcaataaattgcagggttttaaacccgaatctgagaccaataaagcaaagttcgcaacgctttacctaaaaaactttgcgaactttgtgtaattctttgcgagccttgcggttcaaaaaaacttcttaaaagatttaggttacgctctgctggcgcagtttctggaataatttttaccgccaagagcacaaggttttgtgatgtgctaaattttatataaacgcaaagttcgcaacgctttacctaaaaaactttgcgaactttgtgtaattctttgcgagccttgcggttcaaaaaaaacttcttaaaagatttaggttacgctctgctggagcagattttgggaatgatttttaccgccaagagcgtaaggttttgtgatgtgctaaattttgtataaacgcaaagttcgcaacgctttacctaaaaaactttgtgaactttgcgtaattctttgcgagccttgcggttcaaaaaaaacttcttaaaagatttaggttacgctctgctggcgcagtttctgggaataatttttaccgccaagagcacaaggttttgtgatgtgctaaattttatataaacacaaagttcgcaacgctttacctaaaaaaactttgcgaacttttattggtacacatattttttacctatgtaatcataatacccctctgccgtagggaaaaactccaacgttggtcgcgacggagcagcctgacttgccgattgtgctgcaaaggcactaaaacgattcgcttctgccggtggatctttaggaaccgggtcgaacccatcgattgggtctttcggatttcccggatcatccggtgcaggaggttctggatctccaccgcccggatcaaccggaatactttggtcctcgctatacccgtactgaaatcctcccagataatcagtatgagttgtaccgctggtctcttttacaattttcttcagtttttgctccgctgcgttgtaaatatactcaattgatcgagggcttgcaaaggtaatttttactagaccaaatctttgcgttcacgagtgggaagctcatgccagcaaggggtcaaaatatctggtatggtcagcagggaacactctctttccgtttcttagatttgtttcagcaaataggtcttcattctttttgtaaaatctgtagatggtacttttacttgattttgtgctttttataaatttacggttggtgtgtaagtgtgcttatcaatgactttaatgagctgttgagtgccgcaataaaaggcagtacagctgatctgtcaccggtaatgccttattccaattatatcaattggttgaaaaccatagacagagaacattcactgggtcactggaaggagtaccttaaaggttatgcagcaccggcagagattcctttcaagacaagagctgtagacactacttatgtcgaatacagtgaacgccttgaaatagggggagctgtgtttaagcaagtagacacactttgcaccactttaggcattacccacaacacttttatgcaaggtgtatggggctatttattatcacgttacaacaacacgagtgatgtggtttttggagcagtggtatcaggtcgtccggccgatttagcgggagttgaagatatgatcggactgtttagtaatactattccggtcagagtacagtatgatgttgatactacgcctgctgacctgttaaaaatgctgcaagagcaatcgatacaaggtacatcacatcattatatgaacctgtcagaggttcctagttgtgccatctcagcctgagcagcttctgattctcttaaatcataaaagtgaatcatgcagcgattggagcttacagcttcattaaactgctcccatactccctgattctgtttataaaccatacgaaggacatcgtgatgcctcgtcaaatcttctatgctcttctccagtatactgccatccagctcctccttactatatagtaaaacagattgattgaagtactcatgtgcttttatctcctctgatttgaaaaaccattcctggattggggtcagcacaacagcaccgctcacttcactttgattgctatcctgagtggtcaactccattaaccctgccaactctcccagtaccggtgtacttaacaaatgctctactttaagtctgtacccctgttgttttaatctggcggctacccgaatagatttaatagaatctccaccaagattgtaaaaactatccttgataccgatcccttcttttttcaataccgctgaccataccgaaactaaaaccttttcctgttctgttaccggtgctacatattcaacactattttgatacaatcaattgagttggccttaaaatatgcttgtagcttcactccatccattaaagtttctttattgaataagtgcagacatcctccgcttaacaaagaaccgtacaatacagtatttcctaaatcggcagaaagtgaagacattaatccgaaacttttgttggcactgatcgaaatcttagcttccaatccttcgtaataatctaccaaattcttatgactcacctgaactccttttggctgaccagtggttcctgacgtgtacacgacataagctgtagtatcctctgttgccaatgatgtaaaagtaacatcctgcggaagtgcctggatatcggcatactgaatatcaatagaaaatacaggaactgagaagtcaattacatcaaataaactgctggattctatcaataaaccttttatattggcttcctgtaccatgtacaattgacgctcttttggtaaagaaagatcaattggaacataacccgctcctgattttaaaatggataagattcccagtaaagaccagttagaacctacaattcaggcaaccgacacgatacctactacgtttacgatatttatgggaacctgacttatgtagtacccccaaaagtatcggggacagtcagtgacgagattttaaacggtttgtgttaccaatacaaatacgactaccgcaatcgtctggtcgtgaaaaaactgcccggaaaacaatgggagtttatcgtgtacgacaaactcgatcgtcccgtagccacaggaccggctttctcaccttttaaagacgaaaacaccgaaggctggctcattaccaaatacgatgcttttggcagacctgtttatacgggttggagtagtcagccttccaatgcggtgaccagaaaagcactgcaggacacccaaaatacagccaatattatatttgaaacgaaaaagacctcaggaacgatagacaacatcccggtatattatagtaatgacattgctccgaccaattttaagcttttaacggttacttattacgataattatgcttttcccaatgcagaaagccggcctactacaattgatcattacgttacgttatttttggaggagaagcccttaacccggcaaagatcaagtcatggaaagaagagtttccggcctgccgtttagtaaatatgtacggtataaccgagacaacagttcacgttacctatcaggagattggtgatgagcatctggagagcagcaaaagtgtaattggtaaagccattcctaccttaaccatttttattttagacaatgcacagcatttagtacccattggtatagagggagaactctgtattggcggagcaggtttggcacgtggctatctgaaccagccgggattgacagcagataaatttattgcccatccgtttgtggaaggagaacgtctttatcgcagtggggatttagggcgttggcttgctgatgggaacatcgaatatttaggccgaaaagacgatcaggtaaagatcagaggacaccgtattgagattggcgagatagagtacgctttagaacagcatgagcaaatcaagcaagctgtagttttagcgatagaaaaccaatcaggggactctctacatttaatgcatcatgaaagtctttattggatttgatgtttacaaaaacataactcggaaataatggaatttcaattttcttggttcggtcactccattttctaatactggtggccataggtaaaaaagcttctaattttttctccattaactctttgtaaactttactttcatgtctgtactttacgtaaagaacatgccaacctttttttcgatccatattatttggttttttcgtcaccggacatagctgcgctattaccagtcacatggttattttttttagatacgttttttggtttaatagctttacctttttttactcgaaagtaattttggtaatcgtgtttttgttggaactctcaaggtaatttttgattcctttcgagtgtgttgtaaaaatctgaaagctgctaatacaactacttatttttactgaagtaaatttacaatacaggttttcaaattctactacaccaaagtgtagttcaattggttagccttaaatactaccttattgggtagtttatccctaccacaatacccgttatcgttttaggacatgcgttagcgtctgtaatagtaacgctataagttccggcggtaagtcctgttgctgttgcagccgtacctcccgatggagtccatgaataagtatatcctggtgtaccacctgaaggggtaactgttgctgtaccgttattacctccaaaacaggaaacggctgttgtagtagcagttccgtcaacagctgtaggctggccaataacaatacctgttatcgttttaggacatgcgttagcatctgtaatggtaacactataagttccggcagtaagcccggttgccgttgcggctgtacctccggttggagaccatgaataggtatatcccggtgtacctcctgatggggttactgttgctgtaccgttagcacttccaaaacaagaagctgctgttgtagctacagtgccatcaagagcggtagctggttgtcctaccacaatacccgttatcgttttaggacatgcgttagcatctgtaatagtaacactataagttctgtatcgattgctcttgcagcatttttaacaggtcagcagccgtagtatcaacatcatactgtactctgaccggaatggtattactaaacagtccgatcatatcttcaacacctgctaaatcggccggacgacctgataccacagcaccaaacaccacatcactcgtgttgttgtaacgtgacaatagatagccccaaacgccttgtataaaagtgttgtgagtaatgcctaaagtggtgcaaagcgtgtctacttgcttaaacatagctccccctatttcaagacgttcattggatctgatataagtagtcccaacagctcttgtcttaaaaggaatctctaccggtactgcataacctttaaggttgccctcccagtaaccaagtgaatgctctctgtctatggttttcaaccaattgatataattggaataaggtattaccggtggcaaatcagctgtactgccttttattgcggcactcaacagttcattaaagtcattgataagcacacttacacaccaaccgtagcacacttacacaccaaccgtccatcaggatatgatgatggctccagataaactcatactccccttgcgacagatcaacaacatgcaaacgcatctgagaaccactgtttaaatcaaaacctctttccctgtcctgttgcttgatcagctctagctgtacctcgtcatcaagcttctgataagtaaaattactcgctacttctttccttacaatttgcaaagatctccctgcatattcactacggaaactactgcgtaaaacagcatgtctggctgttaaatcatcataagctccttttaacttttctatatccaatactttggcccgtaccttgcatgaaacttgctcaaaaaaaagtgagctggaatcttctgccagccagtggtagtagataccttcctgaagaggggataactcatagacatcctcaagtgtattatctgcgttaagctctaagagctctgccccgctcaatcctttgaaagttaaatccgatggggtcagatgctgaatctcgcctaaaaccccaaccggctgaagcgaattcttttcatttacaatgtaaatctgtgtattgtcaacaggcttgcctatcaaaacttcatgacccacagttgggtgttggcttaagtttattgcagtgacatctatcgaagcctccgttggtccataataattatgcaagctcgaaaaaggagcctttgctttaaaggatgattcgattctttttgataaagcttctccactgcatattacatgctgcaaacattccagtttatcccactttatagtgtccaacgctgcactcaacatcgaaggaacaaagtgaataatacttattttttgtgattctaatagctcctctaagtagaccgggtctttatgcccttccggttttgcaaaaacaagcttactgccacaaaccaatgggaggaataactcccaaaccgaaacgtcaaacgttacaggtgttttctgtaacattggaaggctgactgctccaacccgtataaacaggtctgccaaaagcatcgtatttggtaatgagccagccttcggcagtttcgtctttaaaaggtgagaaagccggtcctgtggctacgggacgatcaagtttgtcgtacacgataaactcccattgttttcccggtagttttttctcgaccagacgattacgatagtcgtatttgtattggtaacacaaaccgtttaaaatctcgtcactgactgtccccgatacttttggcggtactacataagtcaggttcccataaatatcgtaaacgtagtaggtatcgtgtcggttgcctgaattgtaggttcttttgagaataacttgcccttcggtatttttaaattctactgtggagcctgatgactcgcttgggtttgcagttgtattctcgtcgtacgtaatcgttttgtaaagcctcccttcggcataagttcccaatgatgacttttttgcattgggaggccatagcttaaaagcagttcgtctgagcaatgagtatcaaaaggagttaggggtaaagcttactttaagagaggtatttgttcataccagtatagcttcgcaggcagaactgatagcctcttcaaaaagagaggagtttgttccaatagaaaaggcaattgatcaggcaagttatccgatctctgatgcccaaagaaggttatgggtcttaagtcagtttgaaggaggttcgtccgcgtataacataccgggaagcacttacctgagaggaatcattgaaattgaaaacatcaggcgggctattgaggctacaattgatcgccatgagatcttaagaaccgttttcagggaagaggaatcgggagagatcaggcaatggatacttgaaagggaagatttagggtttacgatcgattatcaggactttagagatctcctcttcaggaaggcatctactaccactggctggcagaagattccggttcgctttattttgagcagacctcctatagggtacgggtcaaagtattggatatcgataaactggctattgcttaccagggtttaacagccagacatgctgttttgcgtactaattttagtactgaatatgcagggagatctttgcaaattgtaaggaaagaggtcccgaataattttacttatcagaagctagatgacgaggtacagctagagctgatcaagcaacaggacagggaaagaggtttcgatttgggcagtggttctcagatgcgtctgcatgttgtcgatctgtcgcaaggggagtatgagtttatttggagctctcatcatatcctgatggacggttggtgtgtaagtgtgcttatcaatgactttaatgagctgttgagtgccgcaattccggcaacgactgttttaaataagctcttaaatcacttgcgttctgctcgacattagaaacaatatacgctacaagttctttctctgctgactcgttctctctagctaaaaccactgcctgacttacagcttcatgttttactaaagcgtgctctatctctccaagttctatcctgtgtcctcttatttttacctgatcgtcttttcggcctatgaactcgatgttgccatcgggtagccagcgacccaaatcgcctgttttgtacagacgctctcccgctttaaaaggatttgttatgaacttctctctagttaacccttcctgatttaaataacctcgggctaaaccattaccgcctatacaaatctctccgactactcctatagcttgtaattcttctttttcgtttaaaatataaatctgcgtgttgccaataataccactccaactactgctatttgtgagactgctaccaaaacccttaccgctacaccggcaggaggtacctggagcattgtttcaggaggcggaagcatcacaggatcggtttatacgccagcagatgttactgcggatacagtggtaacgataagatacacggttgcttctaacggaagttgtgccgctagcagttcagatgttaccttcacggtaaacgcttttgcaggcaccgccaataataccactccaactactcctatttgtgagaccgctaccaaaaccttaactgctacaccggcaggaggtacctggagcattgtttcaggaggtggaagcatcacaggatcggtttacacgccagctgatgttacagcagatacagcggtaacgataagatacacagttgcttctaacggagtactaacccaaatggtcaacatgacaattttaaggtgctggtggatgattacaaaacacaacttattagttatggggacgaaaatggcttgaatatttcctccaacttaggtaataaaatacagctaggggacgataatgatgctattacgatcaatgggaagtatgtcattatggattatggaggagcaaatgatctggcacagcttgcaataaacgcaggtaatccggtaaacggcgcagccttaacagtgggtggaatgacctacattggcagctctaaaaatatagaagctaatcccggattaactgacgatcttaaagcggactgctcccttattgttgaaaaacaaattttagcatcagatctgaatattattcctaaaccacattggaaggacgctgtttttgaaaatcttcaggaaggtatctactaccactggctggcagaagattccggttcgctttattttgagcagacctcctacagggtacgagccaaagtgttggatatagaaaagttaaaaggagcttatgatgatttaacagccagacatgctgttttacgcagtagtttcagtactgaatatgcggggagatctttgcaaattgtaaggaaagaagtagcgagtaattttacttatcagaagcttgatgacgaggtacagcttggactgatcaagcaacaggacagggaaagaggttttgatttaaacagtggttctcagatgcgtctgcaggttgttgatctgtcgcaaggggagtatgagtttatctggagccatcatcatatcctgatggacggttggtgtgtaagtgtgctctcagagcggccttacttcaggtagaggaagaggaatattggttctacttcaacatacaccatattattagtgatggttggtcaatggaggtattaaccaaagatatattcaaatactatgaagcctacaggacaggaaaagagcctgatttaaaggaattaagaatccagtacaaggattattcagcctggcagctggctcaattgaaccaggagtcatttaaggcgcatggagaatattggctggacaagctctcaggagagctgccattgctggagcttccaagcagcaaacagcgaccaaaactaaaaacctataagggtcaaagcttaggcgcttatcttgacaaagcaacaacagctaagctaaagggatatgtgcaggagaatggcggcagtcttttactgtaaaagtgtaatcaattctatcaccaacgtttacgattccgtctgcattagcatctacgtaaactccttttttgcttaccgttacttttggtgaagacgttaaaggaactacggtacagcttggacatgcagctggatcttttggtggacaagtcgaacaaattggacttggatcggttgacttagctgttaccggagatcctgttggaggagttcctgtagctgtagccacgttgtctacctgaccgttattcatatcagccaaagtgatggtgtgaaccgctgtaaaactagacgagtctgttgctcctggagctaaactcgctaagcttccacttaccactgcattagcatcactaatggttactggagccagggttacgtttcctgtgttggtaatatcaaaaagtcattcaaagtacttgtaaaataatcaaaatcatgccagtaccacttcaaaatggtactggctaatacaactttaagatgaaaaaatatatcagtacctctataaaatctatagctacagttacggcgtttttagcgatatgcctccagggctatagtcaggataaaaaacaggaaatatcgatctccgtcgcaggacccggttcttttcttaagtacagtggcggtggtactatcgtacccggaaacggaattagtgcaggaatcagatactcctattatttaaacgaaggcttaagcattggaattggagcggagtaccaatcctataattctgatgcaaagtatgcttcttttagtggacaatatgttactaaagatttggtagcagtctcacaaatagcagtagttggagtggtattattggcggtacctgcaaacgcattcaccgtgaaggtaacatctgaactggtagcagcacaacttccgttagaagcaactgtgtatcttatcgttaccgctgtatctgctgtaacattagctggggtgtaaaccgatcctgtaatacttccgcctcctgaaacaatgctccaggtacctcccgcaggtgtagcagttaaggttttggtagccgtttcgcaaatagcagtagttggagtggtattagtcgctgtacctgcaaaagcattcaccgtgaaggtaacatctgaactgctagcggcacaacttccgttagaagcaaccgtgtatcttatcgttaccgctgtatcgagatagagtacgctttagaacagcatgagcaaatcaagcaagctgtagttttagcgatagaaaaccaatcaggggagaaagagttggtggcctatattgtttctaatgtccagcaaaacacaagcggtttaagagtttatttaaaacagaggttggctgagtatatgcttccggcttattacatccaactggaagaacttcccttaacctctaatggaaaagtagacaagaagtccttaccggatcctgaaggttctggtttgtcaagtggtgtagaatatgtagccccacgtaacgagtcagaagagaacatggtcaggatatggagtgaaatattgcgtgtagataaggagaaactgggtattaaagaccgtttttttgaattattgttgcggtaacagaaacgaccccttcggttaatggattaccaggtggcaccaccacggcattaacgggcaacgataccttaaatggaagcccagtagtagtaggtactgcagcagggaatgtacaaatcacatcaagtacggttccagtaggatcaggactagtagtaaatgcagatggaacagtaacagttccggccaacaccccatctggaaactattcagtaagctatacgatttgtgaagtaaacaacccattgaattgtagtactattagctctacggtagtagtaagtgccccggcgattgttgcggtaacagaaacgaccccttcggttaatggattaccaggtggcaccaccacggcattaacgggcaacgaaataataattctcccgaaactccaattggacataacgacatatcgctgctgacaatataagcttcactgtctgagaacaatttcccaaccggaatagttacataatcaaaagcaggatctactttgtgcactaattttccaatcgtactctccgtaggtccgtagtggttcacgatggttacatttggatcttgtgctgcgatctcttttacatgggataccggaagtacatctcctccaaatatgatcgtacgtgccggcagcaacaaatcggtatcgatgcgtaaagcctgccagtgacttggtactattttgatacaatcaattgagttggccttaaaatatgcttgtagcttcactccatccattaaagtttctttattaataaagaaactttaatggatggagtgaagctacaagcatattttaaggccaactcaattgattgtatcaaaatagtgccaagtcactggcaggctttacgcatcgataccgatttgttgctgccggcacgtacgatcatatttggaggggatgtacttccggtatcccatataaaagagatcgcagcacaagatccaaatgtaaccatcgtgaatcattacggacctaccgagagtacgattggaaaattagtgcacaaagtagatcctgcttttgattatgtaaccattccggttggtaaattattctcagacagtgaagcttatattgtcagcagcgatatgtcgttatgtccaattggagtttcgggagaattattattttctcagacagtgaagcttatattgtcagcagcgatatgtcgttatgtccaattggagtttcgggagaattattattaggaggagcaggaatttcaaaaggatatttgaatcgcgaagatttaactcaggaaaaatttatcgccaatccatttacagcaggtaagagcgcagttttataccgaacaggagacttagttcgcagaaattctttaggcgagattgaatttttaggacgagtagacgatcaggttaaaattcgaggataccgtgtcgaattaaaagaaatcagtcgtgtgattcaggggtattccggaattgttcagagtgaggttctgtttaaagaagacggtacaggaactaaacgtctggtgagttatctacagcagatacagcggtaacgataagatacacggttgcttctaacggaagttgtgccgctagcagttcagatgttactttcacggtgaatgcatttgcaggcactgccaataataccactccaactactgctatttgtgaaacggctaccaaaaccttaaccgctacaccggcaggaggtacgtggagcattgtttcaggaggcggaagtatcaccggatcggtttatacgccagctgatgttacagcagatacagcggtaacgataagatacacggttgcttctaacggaagttgtgctgcaacaagttcagatgtaaccttcacggtgaatgcgtttgcaggtaccgccaataactggaagtaaataatgtggatgctaaggcgaatcgtattgcgatcgaagttacggctcaggacggtacggtaaaaacttacaccataaaagtgctcaggctttctgcgccgccaacgattcaggccactaatcttacttttaccaagacgacagggacgagtactacattgaactggaccaatgggaacggggcggcaagaacggtatttatgcgtgaaggtgcaacttcgagtaatcctgtaccggataatacttattttaaagacgatcaaacctttggtaagggtgatcagattggtacaacaggctggtatgccattgttaagactagtgaaggtaatgcgaaaaccttaactgctacaccggcaggaggtacgtggagcattgtttcaggaggcggaagcatcacaggatcggtttacaccccagctgatgttacagcagatacagcggtaacgataagatacacagttgcttctaacggaagttgtgctgctagcagttcagatgttaccttcacggtgaatgcttttgcaggcaccgccaataataccactccaacaaccgctatttgtgagaccgctaccaaaaccttaactgctacaccggcaggaggtacctggagcattgtttcaggaggcggaagcatcacaggatcggtttacaccccagctaatgttacagcaatttaaccatcaatgctgttccgggtaatcctgcggcaccaacggccagtgtaacggttcaaccagactgtttaactccaacgggtaccatcgtagttactgctccggctcctgcggctaatgtgacttataccgtaacaggtaccgctccggtgagacctgcagtgacacagtctacaactacctttgccaatctggctccgggtacttatgccgtaacgacaaccaataccactacaggctgtgtttcattgcctgccaatttaaccatcaatgctgttccgggtaatcctgcggcaccaacggccagtgtaacggttcaaccagactgtttaacccaatgtaaccccaattaaaacaggtccattgagcattgacgccaacggagtattgaccttagatccaaataccgtatcaggaacttaccaaatcacatacgaaatctgtgaagaaggagcaactcctgccaactgtgcaagtgctactgctaccgttgaagttaaaaacccaatcgtagccaacgttgacaacagctacccagttcaaacaccgggtacaacaacggcaactacaattggaaacgtaacagcaaacgacaccttaaacggccagccggtaaccgcagccaataccaatgtaaccccaattaaaacaggtccattgagcattgacgcagagttaaaaaagttagtttggaaaattcgtaaaattcgtgtgattcgtggcaaaaaaactttgcgtcttttttgttttcgcagattagacagctgctttgttcttagattaagtatgaaaaaaatcagctatatctgctagatctgcgagagttaaaaaagttagtttgaaaaatccgtaaaattcgtgtgattcatggcaaaaaaactttgcgtcttttttgttttcgcagattagacagctgctctgttcttagattaagtatgaaaaaaatcagcgatatctgccaaatctgcgagagttaaaaaagttagtttggaaaatgttgttcaccttcaatgatacagcagcagtatatccgaaggacaagacaattgtagacttgtttgaagaacaggttgaaaagacaccggatcatgtagccatagtttttgagaataaagaactgacctacagggagcttaatgagcgatccaatcagttggcgcattacctaatggataattacagcattcagccggatgatctgatagggatacaattggagcgaagcgagtggatgattgtgtcgatactgggtgtgttaaaatcgggaggagcttatgttcctattgatccgcaataccctgaggaaagaatagactatataaaacaggtccattgagcattgacgccaacggagtattgaccttagatccaaacactgtaacaggaacttaccaaattacatacgaaatctgtgaagaaggagcaagccctgccaactgtgctacagctactgcaactgttgaagttaaaaaaccaatcgtagccaacgttgacaacagctacccagttcaaacaccgggtacagcaacggccactacaattggaaacgtaacagcaaacgataccttaaacggccagccggtaaccgcagccaataccaatgtaaccccaattaaaacaggtccattgagcattgacgcaagtagaaccaatattcctcttcctctacctgaagtaaggccgctctgagtaaaggccctttttccaggtcaaatacgcggtaagaatcggctgcgatataggcttctgctttttcttgcttgtcagcttcttctctaaagtcctgataatcgatcgtaaatcctaaatcttccctttcaagtatccattgcctgatctctcccgattcctcttccctgaaaacagttcgtaagatctcatggcgatcaattgtagcctcaatagcccgcctgatgttttcaatttcaatgattcctttcaggtaaggaaaagacgatcaggtaaaaataagagggtataggatagagcttggagagatagagcatgctttagtaaaacatgaagctgtaagtcaggcagttgttttagccaaagagaacgagttgggagagaaagaactcgtagcgtatatcgtttctgatattgagcaaaacacaagcgatttaagagtttatttaaaacagtcgttgccggagtatatgcttccgacgcattttgttcaactcgaggctatcccattaacagccaatggtaaaatagacaaaaaagcattaccgaatcctgaataaatatgccgttccttcggaactcttgaacgtgtcgtgtattttttcaacggattgaaaaccattgctataaatatgtcgttccttcggaactcttgaacgtgttgtatgattttttcaacggattgaaatccattgctataaatatgccgttccttcggaactcttgaacgtgtcgtgtattttttcaacggattgaaaaccattgctataaatatgtcgttccttcggaactcttgaacgtgttgtatgattttttcaacggatcgaaatccgttgcctatgttcgagcattactccttttggattccctgtcgaacctgaggtgtagatcacataaatcaggttctccggttgagacctgcgagtctctacatctttagcataacgctcctggttttctttgaacttgcttaactcttgctcatccaggcaaaccttacactgagtatcttcttttatatagtctattctttcctgtgggtattgcggatcaataggaacataagctcctcccgattttaacacacccaatatcgacacaatcatccactcgctgctgtaacattagctggggtgtaaaccgatcctgtgatgcttccgcctcctgaaacaatgctccaggtacctcctgctggtgtagcagttaaggttttagttgcagtttcacaaatggctgtagttggagtggtattagtcgctgtacctgcaaaagcattcaccgtgaaggtaacatctgaactgctagcagcacaacttccgttagaagcaaccgtgtatcttatcgttaccgctgtatctgctgtaacatcagctgtgaacgcagaaggattcgaaccttcgaccgcctgcttagaaggcaggtgctctatccagctgagctatgcgtccaatattttacaactttaaccgttgttttttctttgagaacaacttgagctctcttttattcgaaaaaaaacttcaactagtacaaccagttgaagtttatttagtactcagagcgggacttgaacccgcacgaacattgctgttcactggattttaagtccagcgtgtctaccaatatatgtgcaggagaatggcggcagtcttttcatgggcttactggcctcatggaaggttttaatgtaccgttataccgctcagcaggatatcatcgtaggaattccggtagcgggtagagatcatgctgatctggaagaccagattggtttttatgtaaacacgctagctttaagaaacagggttaatcctcaggaaagttttgacggttttcaccagtctgtaaaagagcatactttaaattattggcggtacctgcaaacgcattcaccgtgaaggttacatctgaacttgttgcagcacaacttccgttagaagctactgtgtattttatcgttaccgctgtatctgctgtaacatctgccggggtataaactgaaccagtgatacttccgcctcctgaaacaatgctccaggtacctcctgctggtgtagcagttaaggttttagttgcagtttcacaaattaaaccgatcctgtgatgcttccgcctcctgaaacaatgctccacgtacctcctgccggtgtagcagttaaggttttggtagccgtttcgcaaatagcagtagttggtgtggtattggtcgctgtacctgcaaacgcattcaccgtgaaggtaacatctgaactgctagcggcacaacttccgttagaagcaaccgtgtatcttatcgttac
